(19) United States
(12) Patent Application Publication
(10) Pub. No.: US 2020/0282047 A1
(43) Pub. Date: Sep. 10, 2020

(54) EPSTEIN-BARR VIRUS VACCINES

(71) Applicant: ModernaTX, Inc., Cambridge, MA (US)

(72) Inventors: Giuseppe Ciaramella, Sudbury, MA (US); Shinu John, Somerville, MA (US); Elisabeth Narayanan, Cambridge, MA (US); Brooke Bollman, Brookline, MA (US)

(73) Assignee: ModernaTX, Inc., Cambridge, MA (US)

(21) Appl. No.: 16/765,285

(22) PCT Filed: Nov. 20, 2018
(86) PCT No.: PCT/US2018/061926

§ 371 Date: May 19, 2020

Related U.S. Application Data
(60) Provisional application No. 62/589,170, filed on Nov. 21, 2017.

(51) Int. Cl. A61K 39/245; C12N 7/00; A61K 9/51; A61K 9/00

(52) U.S. Cl. CPC A61K 39/245; C12N 7/00; A61K 2039/545; A61K 9/0019; C12N 2710/16234; A61K 9/5123

(57) ABSTRACT

The disclosure relates to EBV ribonucleic acid vaccines as well as methods of using the vaccines and compositions comprising the vaccines.

### BACKGROUND

[0001] Epstein-Barr virus (EBV), also referred to as human herpesvirus 4, is one of the most common human viruses worldwide. Ninety five percent of adults are infected with this virus. EBV spreads most commonly through bodily fluids, primarily saliva, and is the primary cause of infectious mononucleosis (“mono”) and other illnesses. Seventy five percent of college students (18-22 years) with primary EBV infection will develop mono. Symptoms of EBV can include fatigue, fever, inflamed throat, swollen lymph nodes in the neck, enlarged spleen, swollen liver, and rash. While many people are infected with EBV in childhood, childhood symptoms are not distinguished from other mild, brief childhood illnesses. Typically, only teenagers and adults exhibit symptoms characteristic of EBV infection, and although recover is about two to four weeks, some people may feel fatigued for several weeks or even months. Following an EBV infection, the virus becomes latent and, in some cases, may be reactivated. Those with weakened immune systems are more likely to develop symptoms if EBV is reactivated. Currently, there is no vaccine to prevent primary infection or disease.

### SUMMARY

[0002] Provided herein, in some embodiments, are Epstein-Barr virus (EBV) ribonucleic acid (RNA) (e.g., mRNA) vaccines (e.g., combination vaccines) that elicit potent neutralizing antibodies and robust T cell responses, inhibit the production of viral immunomodulatory factors, and/or prevent viral latency. In some aspects, the EBV vaccines include a RNA having an open reading frame (ORF) encoding an EBV antigen, wherein intramuscular (IM) administration of a therapeutically effective amount of the vaccine to a subject induces in the subject a neutralizing antibody titer and/or a T cell immune response (e.g., a CD4+ and/or a CD8+ T cell immune response).

[0003] In some embodiments, the neutralizing antibody titer is at least 100 (e.g., at least 500, or at least 1000) NT₅₀ following, for example, a single dose (e.g., a single 10 μg-200 μg dose) of an EBV RNA vaccine. In some embodiments, the neutralizing antibody titer is at least 100 (e.g., at least 500, or at least 1000) NT₅₀ following a booster (second) dose of an EBV RNA vaccine.

[0004] In some embodiments, the neutralizing antibody titer is sufficient to reduce EBV infection of B cells by at least 50% (e.g., by at least 60%, 70%, 80% or 90%), or relative to a neutralizing antibody titer of an unvaccinated control subject or relative to a neutralizing antibody titer of a subject vaccinated with a live attenuated EBV vaccine, an inactivated EBV vaccine, or a protein subunit EBV vaccine.

[0005] In some embodiments, the neutralizing antibody titer is induced in the subject following fewer than three (one or two) doses of the vaccine.

[0006] In some embodiments, a single dose of an EBV RNA vaccine is of 10 μg-100 μg.

[0007] In some embodiments, the neutralizing antibody titer and/or a T cell immune response is sufficient to reduce the rate of symptomatic infectious mononucleosis relative to the neutralizing antibody titer of unvaccinated control subjects.

[0008] In some embodiments, the neutralizing antibody titer and/or a T cell immune response is sufficient to reduce the rate of asymptomatic EBV infection relative to the neutralizing antibody titer of unvaccinated control subjects.

[0009] In some embodiments, the neutralizing antibody titer and/or a T cell immune response is sufficient to prevent EBV latency the subject.

[0010] In some embodiments, the neutralizing antibody titer and/or a T cell immune response is sufficient to reduce chronic fatigue in the subject.

[0011] In some embodiments, the neutralizing antibody titer is sufficient to block fusion of EBV with epithelial cells and/or B cells of the subject.

[0012] In some embodiments, the neutralizing antibody titer is induced within 20 days following a single 10-100 μg of the vaccine. In some embodiments, the neutralizing antibody titer is induced within 40 days following a second 10-100 μg dose of the vaccine.

[0013] In some embodiments, the ability of a vaccine of the present disclosure to induce a neutralizing antibody response can be demonstrated by injecting animals, e.g., mice or non-human primates, with the vaccine and testing the ability of serum from the animal to neutralize the ability of the virus to infect human B cells.

[0014] In some embodiments, the T cell immune response comprises a CD4⁺ T cell immune response. In some embodiments, the T cell immune response comprises a CD8⁺ T cell immune response. In some embodiments, the T cell immune response comprises both a CD4⁺ T cell immune response and CD8⁺ T cell immune response.

[0015] In some embodiments, after vaccination, the EBV antigen is expressed on the surface of cells of the subject. In some embodiments, the ability of the vaccine to be expressed can be tested in a model system, e.g., a mouse or non-human primate model. In some embodiments, the ability of the vaccine to be expressed can be tested in vitro, e.g., using human cells.

[0016] In some embodiments, a single 2 μg dose of the vaccine induces in mice NT₅₀ neutralizing antibody titers of about 100. In some embodiments, a 2 μg booster dose of the vaccine induces in mice NT₅₀ neutralizing antibody titers of about 1000.

[0017] In some embodiments, the EBV vaccine comprises a RNA having an ORF encoding two EBV antigens, or two RNAs, each having an ORF encoding an EBV antigen.

[0018] In some embodiments, the vaccine comprises a RNA having an ORF encoding two (at least two) EBV antigens formulated in a lipid nanoparticle. In some embodiments, the vaccine comprises two (at least two) RNAs, each having an ORF encoding an EBV antigen, wherein the two RNAs are formulated in a single lipid nanoparticle. In some embodiments, the vaccine comprises two RNAs, each having an ORF encoding an EBV antigen, wherein the each RNAs is formulated in a separate lipid nanoparticle.

[0019] In some embodiments, the EBV vaccines further include at least one (e.g., 2, 3, 4, 5 or more) additional RNA having an ORF encoding at least one (e.g., 2, 3, 4, 5 or more) additional EBV antigen.

[0020] In some embodiments, the lipid nanoparticle comprises a molar ratio of 20-60% ionizable cationic lipid, 5-25% non-cationic lipid, 25-55% sterol, and 0.5-15% PEG-modified lipid

[0021] In some embodiments, the EBV antigens are selected from the group consisting of: gp350, gH, gL, gB, gp42, LMP1, LMP2, EBNA1, and EBNA3.

[0022] In some embodiments, the EBV antigen is a gH-gL fusion, whereby gH is linked to gL through a linker, such as a GGGGS linker. In some embodiments, the GGGGS linker comprises three GGGGS motifs (SEQ ID NO: 224). In some embodiments, the GGGGS linker comprises four GGGGS motifs (SEQ ID NO: 225)). In some embodiments, the EBV RNA comprises the nucleotide sequence of SEQ ID NO: 218. In some embodiments, the EBV RNA comprises the nucleotide sequence of SEQ ID NO: 221.

[0023] In some embodiments, the EBV antigens include EBV gp350 antigen, EBV gH antigen, and EBV gL antigen. In some embodiments, the EBV antigens further include EBV gp42 antigen and/or gB antigen.

[0024] In some embodiments, the EBVgp350 antigen is a wild-type EBV gp350 antigen, a mutated EBV gp350 antigen, or a truncated EBV gp350 antigen.

[0025] In some embodiments, the EBV antigens are selected from the EBV antigens listed in the Sequence Listing.

[0026] In some embodiments, the EBV antigens (one or more EBV antigens) are fused to a scaffold moiety. In some embodiments, the scaffold moiety is selected from the group consisting of: ferritin, encapsulin, lumazine synthase, hepatitis B surface antigen, and hepatitis B core antigen.

[0027] In some embodiments, the RNA comprises messenger RNA (mRNA).

[0028] In some embodiments, the RNA further comprises a 5′ UTR. In some embodiments, the 5′ UTR comprises a sequence identified by SEQ ID NO: 1 or SEQ ID NO: 104.

[0029] In some embodiments, the RNA further comprises a 3′ UTR. In some embodiments, the 3′ UTR comprises a sequence identified by SEQ ID NO: 3 or SEQ ID NO: 106.

[0030] In some embodiments, the EBV antigen is fused to a signal peptide. In some embodiments, the signal peptide is a bovine prolactin signal peptide, optionally comprising SEQ ID NO: 115.

[0031] In some embodiments, the RNA is unmodified.

[0032] In some embodiments, the RNA comprise at least one modified nucleotide. In some embodiments, at least 80% (e.g., 90% or 100%) of the uracil in the ORF comprise 1-methyl-pseudouridine modification.

[0033] Also provided herein, in some aspects, are methods that include administering to a subject an EBV vaccine of the present disclosure in a therapeutically effective amount to induce in the subject a neutralizing antibody titer and/or a T cell immune response.

[0034] In some embodiments, efficacy of the EBV vaccine is at least 80% (e.g., 85%, 90%, 95%, 98% or 100%) relative to unvaccinated control subjects.

[0035] In some embodiments, detectable levels of EBV antigen are produced in the serum of the subject at 1-72 hours post administration of the vaccine.

[0036] In some embodiments, a neutralizing antibody titer of at least 100 (e.g., at least 500 or at least 1000) NU/ml is produced in the serum of the subject at 1-72 hours post administration of the vaccine.

[0037] In some embodiments, the therapeutically effective amount is a total dose of 20 μg-200 μg (e.g., 50 μg-100 μg).

### BRIEF DESCRIPTION OF THE DRAWINGS

[0038] FIG. 1A shows data from a flow cytometry analysis of indel-free codon-optimized glycoprotein 350 (gp350) variant surface expression in HeLa cells using 72A1 antibody. FIGS. 1B and 1C are bar graphs showing percent gp350 variant expression (percent 72A1 positive) on the surface of HeLa cells transfected with 1 μg (FIG. 1B) or 0.5 μg (FIG. 1C) of mRNA.

[0039] FIG. 2A shows data from a flow cytometry analysis of expression of gp350 mRNA having one of two different 5′ untranslated region (UTR) sequences (compare UTR A and UTR B). FIG. 2B is a bar graph showing percent gp350 expression on the surface of HeLa cells transfected with 0.5 μg of a gp350 mRNA having one of the two different 5′ UTR sequences.

[0040] FIG. 3 is a graph showing the geometric mean (with 95% confidence interval) of neutralizing antibody titers produced in Balb/c mice following intramuscular (IM) vaccination with mRNA encoding EBV gp350 variants formulated in a lipid nanoparticle. A 2 μg dose was administered on Day 1 and then again on Day 21. Mice were bled on Day 21 and Day 43. NT₅₀ titers represent the reciprocal serum dilutions to block 50% viral entry. All gp350 variants exhibited comparable neutralizing titers.

[0041] FIG. 4A shows data from a flow cytometry analysis of surface expression of the indicated EBV antigens (EBV gp42) and EBV antigen complexes (EBV gH/gL/gp42 with indicated 5′ UTR, or EBV gH/gp42) in HeLa cells using 2D4 antibody. FIG. 4B is a bar graph showing percent antigen expression (percent 2D4 positive) on the surface of HeLa cells transfected with 0.25 μg of the mRNA 24 hours post transfection.

[0042] FIG. 5 is a graph showing the geometric mean (with 95% confidence interval) of neutralizing antibody titers produced in Balb/c mice following IM vaccination with mRNA encoding indicated EBV antigens (EBV gp350) and EBV antigen complexes (EBV gH/gL/gp42 or gH/gL/gp42/gp350) formulated in a lipid nanoparticle. Various indicated doses were administered on Day 1 and then again on Day 29. Mice were bled on Day 28 and Day 57. NT₅₀ titers represent the reciprocal serum dilutions to block 50% viral entry. These data show that gp350 and gH/gL/gp42 elicit comparable B cell neutralizing titers. There is no interference observed by combining all of the mRNAs in one LNP vaccine.

[0043] FIG. 6A shows data from a flow cytometry analysis of surface expression of EBV gH antigen and EBV gH/gL antigen complex in HeLa cells using 2A8 antibody, or surface expression of EBV gH/gL antigen complex in HeLa cells using 2D4 antibody. FIG. 6B is a bar graph showing percent gH/gL expression on the surface of HeLa cells transfected with 0.25 μg of a gH mRNA and a gL mRNA, having one of the two different 5′ UTR sequences, 24 hours post transfection.

[0044] FIG. 7 is a graph showing gH/gL-specific binding antibody titers (log₁₀) produced in Balb/c mice following IM vaccination with mRNA encoding indicated EBV antigen complexes (EBV gH/gL, EBV gH/gL/gB, EBV gH/gL/gp350, or EBV gH/gL/gB/gp350) formulated in a lipid nanoparticle. Various indicated doses were administered.

[0045] FIG. 8 is a graph showing gB-specific binding antibody titers (log₁₀) produced in Balb/c mice following IM vaccination with mRNA encoding indicated EBV antigen (EBV gB) or EBV antigen complexes (EBV gH/gL/gB, EBV gB/gp350, or EBV gH/gL/gB/gp350) formulated in a lipid nanoparticle. Various indicated doses were administered.

[0046] FIG. 9 is a graph showing gp350-specific binding antibody titers (log₁₀) produced in Balb/c mice following IM vaccination with mRNA encoding indicated EBV antigen (EBV gp350) or EBV antigen complexes (EBV gH/gL/gp350, EBV gB/gp350, or EBV gH/gL/gB/gp350) formulated in a lipid nanoparticle. Various indicated doses were administered.

[0047] FIGS. 10A-10D show antigen-specific CD8 T cell responses to various EBV latent genes in Balb/c mice following IM vaccination with mRNA encoding either LMP1, LMP2, EBNA1 (EBAN1d1-400), EBNA3A alone or a combination (combo) of LMP1, LMP2, EBNA1, EBNA3A and gp350.

[0048] FIGS. 11A-11D show antigen-specific CD4 T cell responses to various EBV latent genes in Balb/c mice following IM vaccination with mRNA encoding either LMP1, LMP2, EBNA1 (EBAN1d1-400), EBNA3A alone or a combination (combo) of LMP1, LMP2, EBNA1, EBNA3A and gp350.

[0049] FIG. 12 shows schematics of EBV gp350 variants of the present disclosure.

[0050] FIGS. 13A-13B show data from a flow cytometry analysis for surface expression in HeLa cells transfected with mRNA encoding either a linked glycoprotein L (gL) and glycoprotein H (gH) construct (gL-gH Linker A or gL-gH Linker B) or individual gH and gL that are co-transfected using 2A8 antibody. FIG. 13B is a bar graph showing percent gL-gH expression (percent 2A8 positive and percent CL40 positive) on the surface of the HeLa cells transfected with the indicated mRNA. Mean fluorescence intensity (MFI) is also shown.

[0051] FIG. 14 shows EBNA1-specific polyclonal CD4 and CD8 T cell responses (e.g., IFNγ, TNFα, and IL-2 secretion) in Balb/c mice following IM vaccination with various mRNAs encoding EBV antigens (LMP2, EBNA1, gH, gL, and gp350, with UTR1 or UTR2) or mRNA encoding EBNA1 antigen alone.

[0052] FIG. 15 shows LMP2-specific polyclonal CD4 and CD8 T cell responses (e.g., IFNγ, TNFα, and IL-2 secretion) in Balb/c mice following IM vaccination with mRNAs encoding various EBV antigens (LMP2, EBNA1, gH, gL, and gp350, with UTR1 or UTR2) or mRNA encoding LMP2 antigen alone.

[0053] FIG. 16 shows a schematic of the experimental protocol (top) and graphs of the resulting gp350-specific IgG titers (bottom left) and gH/gL-specific IgG titers (bottom right) in immune sera of non human primates (NHPs) vaccinated with a combination EBV mRNA vaccine (gp350, gH, gL, LMP2, and EBNA1) or control.

[0054] FIG. 17 is a graph showing the neutralizing titers against EBV infection of Raji B cells in immune sera of NHPs vaccinated with the indicated doses and constructs or the neutralizing titers present in EBV+ human sera.

[0055] FIG. 18 is a graph showing the gp350-specific IgG titers following cell transfection with EBV vaccine constructs generated using different downstream purification processes.

[0056] FIG. 19 is a graph showing the gH/gL-specific IgG titers following cell transfection with EBV vaccine constructs generated using different downstream purification processes.

### DETAILED DESCRIPTION

[0057] The Epstein-Barr virus (EBV) is a double-stranded DNA γ-herpesvirus that infects B cells and epithelial cells, causing infectious mononucleosis, and that has been linked to malignancies, such as Burkitt's lymphoma, Hodgkin's lymphoma, and nasopharyngeal carcinoma, in both cell types in vivo. Nearly 95% of the population is infected by EBV by adulthood and carries EBV DNA throughout life. EBV is maintained in a latent state in infected B lymphocytes, with periodic reactivation of lytic replication.

[0058] EBV, widespread in all human populations, can be isolated in vitro via its ability to transform resting human B cells into permanent lymphoblastoid cell lines (LCLs) expressing the virus-coded antigens EBNA1, 2, 3A, 3B, 3C, and LP and the latent membrane proteins (LMPs) 1, 2A, and 2B. EBV isolates can be categorized as type 1 or type 2 on the basis of marked allelic polymorphisms within the EBNA2, 3A, 3B, and 3C genes and into distinct strains on the basis of more-subtle sequence variations within the EBNA1, EBNA2, and LMP1 genes and certain lytic cycle genes.

[0059] EBV has three glycoproteins, glycoprotein B (gB), gH, and gL, that form the core membrane fusion machinery mediating viral entry into a cell. The gH and gL proteins associate to form a heterodimeric complex, which is necessary for efficient membrane fusion and is also implicated in direct binding to epithelial cell receptors required for viral entry. EBV uses different pathways for the infection of epithelial cells and B lymphocytes. For both cell types, the minimal viral glycoprotein components that mediate membrane fusion have been identified. As with other herpesviruses, EBV uses the core viral entry glycoproteins, glycoprotein B (gB) and the gH/gL complex. For the infection of B lymphocytes, EBV requires an additional protein, gp42, which binds to host HLA class II molecules, triggering the membrane fusion step. gp42 has multiple functional sites for interaction with gH/gL, HLA class II, and potentially, another unknown binding ligand that could be engaged through a large surface-exposed hydrophobic pocket. The gp42 protein binds to the gH/gL complex with nanomolar affinity through its N-terminal region, and this interaction can be recapitulated with a synthetic peptide of ˜35 aa residues. EBV glycoprotein-mediated membrane fusion with epithelial cells does not require gp42 but only gB and gH/gL. Recent observations indicate that EBV gH/gL engages integrins αvβ6 and/or αvβ8 on epithelial cells to trigger membrane fusion and entry.

[0060] The EBV gp350 glycoprotein encoded by BLLF1 is important for efficient EBV infection of resting B cells. Gp350 is the most abundant viral protein in the viral envelope. This large protein is heavily glycosylated and localizes to various subcellular compartments (cytoplasm, endoplasmic reticulum, Golgi, and plasma membrane) of replicating cells. EBV binds to primary B cells through its interaction with CD21, the complement receptor 2 (CR2) via gp350. Several gp350 domains appear to be involved in the formation of a stable complex with CD21, one of which has been identified as the receptor-binding site (amino acids [aa] 142 to 161). This glycan-free domain is also recognized by the neutralizing gp350-specific antibody 72A.

[0061] The present disclosure is not limited by a particular strain of EBV. The strain of EBV used in a vaccine may be any strain of EBV.

[0062] The present disclosure provides RNA (e.g., mRNA) vaccines against EBV infection—vaccines that elicit potent neutralizing antibodies and robust T cell responses against EBV antigens, inhibit the production of viral immunomodulatory factors, and/or prevent viral latency.

[0063] In some embodiments, vaccines disclosed herein are used therapeutically, i.e., following infection with EBV (to treat the infection). In some embodiments, the vaccines of the present disclosure can be used to prevent or reduce the frequency of Hodgkin's lymphoma, Burkitt's lymphoma, gastric carcinoma, nasopharyngeal carcinoma, post-transplant lymphoproliferative disease, diffuse B cell lymphoma, and/or NK/T cell lymphoma.

[0064] The EBV RNA vaccines described herein are superior to current vaccines in several ways. For example, the lipid nanoparticle (LNP) delivery system used herein increases the efficacy of RNA vaccines in comparison to other formulations, including a protamine-based approach described in the literature. The use of this LNP delivery system enables the effective delivery of chemically-modified RNA vaccines or unmodified RNA vaccines, without requiring additional adjuvant to produce a therapeutic result (e.g., production neutralizing antibody titer and/or a T cell response). In some embodiments, the EBV RNA vaccines disclosed herein are superior to conventional vaccines by a factor of at least 10 fold, 20, fold, 40, fold, 50 fold, 100 fold, 500 fold, or 1,000 fold when administered intramuscularly (IM) or intradermally (ID). These results can be achieved even when significantly lower doses of the RNA (e.g., mRNA) are administered in comparison with RNA doses used in other classes of lipid based formulations.

[0065] The LNP used in the studies described herein has been used previously to deliver siRNA in various animal models as well as in humans. In view of the observations made in association with the siRNA delivery of LNP formulations, the fact that LNP is useful in vaccines is quite surprising, particularly when immunity to an antigen has been hard to generate, as in the case of EBV. It has been observed that therapeutic delivery of siRNA formulated in LNP causes an undesirable inflammatory response associated with a transient IgM response, typically leading to a reduction in antigen production and a compromised immune response. In contrast to the findings observed with siRNA, the LNP-mRNA formulations of the present disclosure are demonstrated herein to generate enhanced IgG levels, sufficient for prophylactic and therapeutic methods rather than transient IgM responses.

### Exemplary Epstein-Barr Virus (EBV) Antigens

[0066] Antigens are proteins capable of inducing an immune response (e.g., causing an immune system to produce antibodies against the antigens). Herein, use of the term antigen encompasses immunogenic proteins and immunogenic fragments (an immunogenic fragment that induces (or is capable of inducing) an immune response to EBV), unless otherwise stated. It should be understood that the term “protein’ encompasses peptides and the term “antigen” encompasses antigenic fragments.

[0067] A number of different antigens are associated with EBV. EBV vaccines, as provided herein, comprise at least one (one or more) ribonucleic acid (RNA, e.g., mRNA) having an open reading frame encoding at least one EBV antigen. Non-limiting examples of EBV antigens are provided below.

[0068] Exemplary EBV antigens are provided in the Sequence Listing elsewhere herein. For example, the antigens may be encoded by (thus the RNA may comprise or consist of) any one of sequences set forth in SEQ ID NO: 130, 131, 132, 133, 134, 135, 136, 137, 138, 139, 140, 141, 142, 143, 144, 145, 146, 147, 148, 149, 150, 151, 152, 153, 154, 155, 156, 157, 158, 159, 160, 161, 162, 163, 164, 165, 166, 167, 168, 169, 170, 171, 172, 173, 174, 175, 176, 177, 178, 179, 180, 181, 182, 183, 184, 185, 186, 187, 188, 189, 190, 191, 192, 193, 194, 195, 196, 197, 198, 199, 200, 201, 202, 203, 204, 205, 206, 207, 208, 209, and/or 210. In some embodiments, the aforementioned sequences may further comprise a 5′ cap (e.g., 7mG(5′)ppp(5′)NlmpNp), a polyA tail, or a 5′ cap and a polyA tail.

[0069] It should be understood that the EBV vaccines of the present disclosure may comprise any of the RNA open reading frames (ORFs), or encode any of the protein ORFs, described herein, with or without a signal sequence. It should also be understood that the EBV vaccines of the present disclosure may include any 5′ untranslated region (UTR) and/or any 3′ UTR. Exemplary UTR sequences are provided in the Sequence Listing (e.g., SEQ ID NOs: 1, 3, 104 and 106; however, other UTR sequences (e.g., of the prior art) may be used or exchanged for any of the UTR sequences described herein. UTRs may also be omitted from the vaccine constructs provided herein.

[0070] EBV entry into B cells is initiated by attachment of glycoprotein gp350 to the complement receptor type 2 (CR2). A complex of three glycoproteins, gH, gL, and gp42, is subsequently required for penetration. gp42 binds to HLA class II, which functions as an entry mediator or co-receptor and, by analogy with other herpesviruses, gH is then thought to be involved virus-cell fusion. Entry of virus into epithelial cells is different. It can be initiated by attachment by an unknown glycoprotein in the absence of CR2. There is no interaction between gp42 and HLA class II and instead a distinct complex of only the two glycoproteins gH and gL interacts with a novel entry mediator.

[0071] EBV gH-gL complex includes of three glycoproteins, gp85, the gH homolog, which is the product of the BXLF2 open reading frame (ORF); gp25, the gL homolog, which is the product of the BKRF2 ORF; and gp42, which is the product of the BZLF2 ORF. The complex behaves in many respects like its counterparts in other herpesviruses. Glycoprotein gH is dependent on gL for authentic processing and transport, and the complex as a whole has been implicated as important to the ability of virus to fuse with the cell membrane and penetrate into the cytoplasm

[0072] The gp350 glycoprotein encoded by BLLF1 is important for efficient Epstein-Barr virus (EBV) infection of resting B cells.

[0073] The major EBV glycoprotein gp350 mediates docking of EBV on B cells by binding receptor type 2 (CR2) (Nemerow et al., J of Virol. (61):1416-1420 (1987); Szakonyi et al., Nat Struct Mol Biol. (13): 996-1001 (2006)). Due to alternative splicing, BLLF1 encodes gp350 and gp220, which are glycosylated and are approximately 350 and 220 kilodaltons in molecular weight, respectively (Beisel et al., J Virol. (54):665-674 (1985); Hummel et al., J Virol. (49):413-417 (1984)). In some embodiments, the EBV gp350 antigen comprises the sequence identified by SEQ ID NO: 81, 204, 185, 182, 207, or 208.

[0074] After EBV docking, EBV fuses with the plasma membrane of the host cell using a complex of glycoproteins. The core EBV membrane fusion machinery for entry into B cells and epithelial cells includes glycoprotein B (gB), glycoprotein H (gH) and glycoprotein L (gL) (Hutt-Fletcher et al., J Virol. (81): 7825-7832 (2007)).

[0075] gB is a single pass type 1 membrane protein also referred to as gp110 and is encoded by the BALF4 open reading frame (ORF) (Herrold et al., J of Virol. (70):2049-2054 (1996); Haan et al., Virology (290): 106-114 (2001)); McShane et al., Proc Natl Acad Sci USA. (101): 17474-17479 (2004)). In some embodiments, the EBV gB antigen comprises the sequence identified by SEQ ID NO: 209.

[0076] gH (also referred to as gp85) is a type 1 transmembrane protein encoded by the open reading frame (ORF) of the BXLF2 gene (Heineman et al., J Virol. (62):1101-1107 (1988)); Oba et al., J Virol. (62):1108-1114 (1988)). In some embodiments, the EBV gH antigen comprises the sequence identified by SEQ ID NO: 187.

[0077] gL (also referred to as gp25) and encoded by BKRF2 ORF is required for proper folding and localization of gH (Li et al., J Virol. (69): 3987-3994 (1995); Yaswen et al., Virology. (195): 387-396 (1993)). Therefore, gH and gL often functions as a complex to mediate viral fusion and this complex has been crystallized (Matsurra et al., Proc Natl Acad Sci USA. (107):22641-2264 (2010)). In some embodiments, the EBV gL antigen comprises the sequence identified by SEQ ID NO: 188.

[0078] In addition to the core membrane fusion machinery, EBV entry into B cells requires gp42, which is encoded by a BZLF2 ORF (Kirschner et al., J. Virol. (80):9444-54 (2006); Wang et al., J. Virol., (72):5552-5558 (1998); Silva et al., J. Virol. (78): 5946-5956 (2004); Li et al. J. Virol., (69):3987-3994 (1995). EBV gp42 mediates viral fusion with B cells by binding MHC class II molecules (Mullen et al., Molecular Cell. (9):375-385 (2002); Haan et al. J Virol. (74): 2451-4 (2000)). In some embodiments, the EBV gp42 antigen comprises the sequence identified by SEQ ID NO: 189.

[0079] Latent membrane protein 1 (LMP1) is a six transmembrane domain protein that promotes immortalization of resting B cells and helps protect EBV-infected B cells from apoptosis (Hennessy et al., Proc Natl. Acad. Sci USA. (81): 7207-11 (1984); Kaye et al., Proc Natl Acad Sci USA. (90): 9150-9154 (1993); Henderson et al., Cell (65): 1107-1115 (1991)). A number of signaling pathways may be activated by LMP1, including tumor necrosis factor receptor family signaling and DNA synthesis (Peng et al. Oncogene. (7): 1775-1782; Masialos et al., Cell. (80):389-399 (1995); Li et al., J Biomed Sci. (10):490-504 (2003)). Furthermore, LMP1 signaling can upregulate expression of the anti-apoptosis Bc1-2 oncogene in B cells (Rowe et al., J Virol. (68):5602-12 (1994)). In some embodiments, the EBV LMP1 antigen comprises the sequence identified by SEQ ID NO: 179.

[0080] Similar to LMP1, Latent membrane protein 2 (LMP2) is an EBV-encoded transmembrane protein that is often expressed in latently infected cells. There are two isoforms of LMP2 (LMP2A and LMP2B) (Laux et al., EMBO J. (7):769-74 (1988); Longnecker et al., J Virol. (64):2319-26 (1990)). LMP2A is implicated in maintaining EBV latency. For example, LMP2A can exclude B-cell receptor (BCR) from lipid rafts to prevent lytic induction (Dykstra et al., Immunity. (14):57-67 (2001)). LMP2A can also activate the phosphatidylinositol 3-kinase (PI3-K)/Akt pathway to promote cell survival (Scholle et al., J Virol. (74): 10681-10689 (2000); Swart et al. J Virol. (74): 10838-10845 (2000); Fukuda et al., J. Virol. (78): 1697-16705 (2004)). LMP2B protein generally lacks 119 amino-terminal amino acids compared to LMP2A and is implicated in epithelial cell spreading and motility (Allen et al., J Virol. (79):1789-1802 (2005)). In some embodiments, the EBV LMP2 antigen comprises the sequence identified by SEQ ID NO: 181.

[0081] Epstein-Barr nuclear antigens (ENBAs) that help establish latent infection include EBNA1, EBNA2, EBNA3A and EBNA3C. EBNA1 encoded by BKRF1 promotes viral DNA replication, episomal maintenance and episomal partitioning (Rawlins et al., Cell (42): 859-68 (1985); (Hung et al., Proc Natl Acad Sciences USA (98): 1865-1870 (2001)). In particular, EBNA1 can bind family of repeats and dyad symmetry elements of the latent origin oriP. In some embodiments, the EBV EBNA1 antigen comprises the sequence identified by SEQ ID NO: 178.

[0082] There are three members of the EBNA3 family: EBNA3A, EBNA3B and EBNA3C. EBNA3s regulate transcription by binding RBPJ, which is a transcriptional regulator in the Notch signaling pathway (Zhao et al., J Virol. (70):4228-4236 (1996); Robertson et al., J Virol. (69):3108-3116 (1995); Robertson et al. J Virol. (70):3068-3074 (1996)). In particular, EBNA3A and EBNA3C have been shown to be required for EBV-mediated transformation of B cells (Tomkinson et al. J Virol. (67):2014-25 (1993)). In some embodiments, the EBV EBNA3A antigen comprises the sequence identified by SEQ ID NO: 177.

### Nucleic Acids

[0083] The EBV vaccines of the present disclosure comprise at least one (one or more) ribonucleic acid (RNA) having an open reading frame encoding at least one EBV antigen. In some embodiments, the RNA is a messenger RNA (mRNA) having an open reading frame encoding at least one EBV antigen. In some embodiments, the RNA (e.g., mRNA) further comprises a (at least one) 5′ UTR, 3′ UTR, a polyA tail and/or a 5′ cap.

[0084] Nucleic acids comprise a polymer of nucleotides (nucleotide monomers), also referred to as polynucleotides. Nucleic acids may be or may include, for example, deoxyribonucleic acids (DNAs), ribonucleic acids (RNAs), threose nucleic acids (TNAs), glycol nucleic acids (GNAs), peptide nucleic acids (PNAs), locked nucleic acids (LNAs, including LNA having a β-D-ribo configuration, α-LNA having an α-L-ribo configuration (a diastereomer of LNA), 2′-amino-LNA having a 2′-amino functionalization, and 2′-amino-α-LNA having a 2′-amino functionalization), ethylene nucleic acids (ENA), cyclohexenyl nucleic acids (CeNA) and/or chimeras and/or combinations thereof.

[0085] Messenger RNA (mRNA) is any ribonucleic acid that encodes a (at least one) protein (a naturally-occurring, non-naturally-occurring, or modified polymer of amino acids) and can be translated to produce the encoded protein in vitro, in vivo, in situ or ex vivo. The skilled artisan will appreciate that, except where otherwise noted, nucleic acid sequences set forth in the instant application may recite “T”s in a representative DNA sequence but where the sequence represents RNA (e.g., mRNA), the “T”s would be substituted for “U”s. Thus, any of the DNAs disclosed and identified by a particular sequence identification number herein also disclose the corresponding RNA (e.g., mRNA) sequence complementary to the DNA, where each “T” of the DNA sequence is substituted with “U.”

[0086] An open reading frame (ORF) is a continuous stretch of DNA or RNA beginning with a start codon (e.g., methionine (ATG or AUG)) and ending with a stop codon (e.g., TAA, TAG or TGA, or UAA, UAG or UGA). An ORF typically encodes a protein. It will be understood that the sequences disclosed herein may further comprise additional elements, e.g., 5′ and 3′ UTRs, but that those elements, unlike the ORF, need not necessarily be present in a vaccine of the present disclosure.

### Variants

[0087] In some embodiments, an RNA of the present disclosure encodes an EBV antigen variant. Antigen or other polypeptide variants refers to molecules that differ in their amino acid sequence from a wild-type, native or reference sequence. The antigen/polypeptide variants may possess substitutions, deletions, and/or insertions at certain positions within the amino acid sequence, as compared to a native or reference sequence. Ordinarily, variants possess at least 50% identity to a wild-type, native or reference sequence. In some embodiments, variants share at least 80%, or at least 90% identity with a wild-type, native or reference sequence.

[0088] Variant antigens/polypeptides encoded by nucleic acids of the disclosure may contain amino acid changes that confer any of a number of desirable properties, e.g., that enhance their immunogenicity, enhance their expression, and/or improve their stability or PK/PD properties in a subject. Variant antigens/polypeptides can be made using routine mutagenesis techniques and assayed as appropriate to determine whether they possess the desired property. Assays to determine expression levels and immunogenicity are well known in the art and exemplary such assays are set forth in the Examples section. Similarly, PK/PD properties of a protein variant can be measured using art recognized techniques, e.g., by determining expression of antigens in a vaccinated subject over time and/or by looking at the durability of the induced immune response. The stability of protein(s) encoded by a variant nucleic acid may be measured by assaying thermal stability or stability upon urea denaturation or may be measured using in silico prediction. Methods for such experiments and in silico determinations are known in the art.

[0089] In some embodiments, an EBV vaccine comprises an mRNA ORF having a nucleotide sequence identified by any one of the sequences provided herein (see e.g., Sequence Listing), or having a nucleotide sequence at least 80%, at least 85%, at least 90%, at least 95%, at least 96%, at least 97%, at least 98%, or at least 99% identical to a nucleotide sequence identified by any one of the sequence provided herein.

[0090] The term “identity” refers to a relationship between the sequences of two or more polypeptides (e.g. antigens) or polynucleotides (nucleic acids), as determined by comparing the sequences. Identity also refers to the degree of sequence relatedness between or among sequences as determined by the number of matches between strings of two or more amino acid residues or nucleic acid residues. Identity measures the percent of identical matches between the smaller of two or more sequences with gap alignments (if any) addressed by a particular mathematical model or computer program (e.g., “algorithms”). Identity of related antigens or nucleic acids can be readily calculated by known methods. “Percent (%) identity” as it applies to polypeptide or polynucleotide sequences is defined as the percentage of residues (amino acid residues or nucleic acid residues) in the candidate amino acid or nucleic acid sequence that are identical with the residues in the amino acid sequence or nucleic acid sequence of a second sequence after aligning the sequences and introducing gaps, if necessary, to achieve the maximum percent identity. Methods and computer programs for the alignment are well known in the art. It is understood that identity depends on a calculation of percent identity but may differ in value due to gaps and penalties introduced in the calculation. Generally, variants of a particular polynucleotide or polypeptide (e.g., antigen) have at least 40%, 45%, 50%, 55%, 60%, 65%, 70%, 75%, 80%, 85%, 90%, 91%, 92%, 93%, 94%, 95%, 96%, 97%, 98%, 99% but less than 100% sequence identity to that particular reference polynucleotide or polypeptide as determined by sequence alignment programs and parameters described herein and known to those skilled in the art. Such tools for alignment include those of the BLAST suite (Stephen F. Altschul, et al (1997), “Gapped BLAST and PSI-BLAST: a new generation of protein database search programs”, Nucleic Acids Res. 25:3389-3402). Another popular local alignment technique is based on the Smith-Waterman algorithm (Smith, T. F. & Waterman, M. S. (1981) “Identification of common molecular subsequences.” J. Mol. Biol. 147:195-197). A general global alignment technique based on dynamic programming is the Needleman-Wunsch algorithm (Needleman, S. B. & Wunsch, C. D. (1970) “A general method applicable to the search for similarities in the amino acid sequences of two proteins.” J. Mol. Biol. 48:443-453). More recently a Fast Optimal Global Sequence Alignment Algorithm (FOGSAA) has been developed that purportedly produces global alignment of nucleotide and protein sequences faster than other optimal global alignment methods, including the Needleman-Wunsch algorithm.

[0091] As such, polynucleotides encoding peptides or polypeptides containing substitutions, insertions and/or additions, deletions and covalent modifications with respect to reference sequences, in particular the polypeptide (e.g., antigen) sequences disclosed herein, are included within the scope of this disclosure. For example, sequence tags or amino acids, such as one or more lysines, can be added to peptide sequences (e.g., at the N-terminal or C-terminal ends). Sequence tags can be used for peptide detection, purification or localization. Lysines can be used to increase peptide solubility or to allow for biotinylation. Alternatively, amino acid residues located at the carboxy and amino terminal regions of the amino acid sequence of a peptide or protein may optionally be deleted providing for truncated sequences. Certain amino acids (e.g., C-terminal or N-terminal residues) may alternatively be deleted depending on the use of the sequence, as for example, expression of the sequence as part of a larger sequence which is soluble, or linked to a solid support. In some embodiments, sequences for (or encoding) signal sequences, termination sequences, transmembrane domains, linkers, multimerization domains (such as, e.g., foldon regions) and the like may be substituted with alternative sequences that achieve the same or a similar function. In some embodiments, cavities in the core of proteins can be filled to improve stability, e.g., by introducing larger amino acids. In other embodiments, buried hydrogen bond networks may be replaced with hydrophobic resides to improve stability. In yet other embodiments, glycosylation sites may be removed and replaced with appropriate residues. Such sequences are readily identifiable to one of skill in the art. It should also be understood that some of the sequences provided herein contain sequence tags or terminal peptide sequences (e.g., at the N-terminal or C-terminal ends) that may be deleted, for example, prior to use in the preparation of an RNA (e.g., mRNA) vaccine.

[0092] As recognized by those skilled in the art, protein fragments, functional protein domains, and homologous proteins are also considered to be within the scope of EBV antigens of interest. For example, provided herein is any protein fragment (meaning a polypeptide sequence at least one amino acid residue shorter than a reference antigen sequence but otherwise identical) of a reference protein, provided that the fragment is immunogenic and confers a protective immune response to the EBV pathogen. In addition to variants that are identical to the reference protein but are truncated, in some embodiments, an antigen includes 2, 3, 4, 5, 6, 7, 8, 9, 10, or more mutations, as shown in any of the sequences provided or referenced herein. Antigens/antigenic polypeptides can range in length from about 4, 6, or 8 amino acids to full length proteins.

### Stabilizing Elements

[0093] Naturally-occurring eukaryotic mRNA molecules can contain stabilizing elements, including, but not limited to untranslated regions (UTR) at their 5′-end (5′ UTR) and/or at their 3′-end (3′ UTR), in addition to other structural features, such as a 5′-cap structure or a 3′-poly(A) tail. Both the 5′ UTR and the 3′ UTR are typically transcribed from the genomic DNA and are elements of the premature mRNA. Characteristic structural features of mature mRNA, such as the 5′-cap and the 3′-poly(A) tail are usually added to the transcribed (premature) mRNA during mRNA processing.

[0094] In some embodiments, a vaccine includes at least one RNA polynucleotide having an open reading frame encoding at least one antigenic polypeptide having at least one modification, at least one 5′ terminal cap, and is formulated within a lipid nanoparticle. 5′-capping of polynucleotides may be completed concomitantly during the in vitro-transcription reaction using the following chemical RNA cap analogs to generate the 5′-guanosine cap structure according to manufacturer protocols: 3′-O-Me-m7G(5′)ppp(5′) G [the ARCA cap]; G(5′)ppp(5′)A; G(5′)ppp(5′)G; m7G(5′)ppp(5′)A; m7G(5′)ppp(5′)G (New England BioLabs, Ipswich, Mass.). 5′-capping of modified RNA may be completed post-transcriptionally using a Vaccinia Virus Capping Enzyme to generate the “Cap 0” structure: m7G(5′)ppp(5′)G (New England BioLabs, Ipswich, Mass.). Cap 1 structure may be generated using both Vaccinia Virus Capping Enzyme and a 2′-O methyl-transferase to generate: m7G(5′)ppp(5′)G-2′-O-methyl. Cap 2 structure may be generated from the Cap 1 structure followed by the 2′-O-methylation of the 5′-antepenultimate nucleotide using a 2′-O methyl-transferase. Cap 3 structure may be generated from the Cap 2 structure followed by the 2′-O-methylation of the 5′-preantepenultimate nucleotide using a 2′-O methyl-transferase. Enzymes may be derived from a recombinant source.

[0095] The 3′-poly(A) tail is typically a stretch of adenine nucleotides added to the 3′-end of the transcribed mRNA. It can, in some instances, comprise up to about 400 adenine nucleotides. In some embodiments, the length of the 3′-poly(A) tail may be an essential element with respect to the stability of the individual mRNA.

[0096] In some embodiments, EBV RNA vaccines may include one or more stabilizing elements. Stabilizing elements may include for instance a histone stem-loop. A stem-loop binding protein (SLBP), a 32 kDa protein has been identified. It is associated with the histone stem-loop at the 3′-end of the histone messages in both the nucleus and the cytoplasm. Its expression level is regulated by the cell cycle; it peaks during the S-phase, when histone mRNA levels are also elevated. The protein has been shown to be essential for efficient 3′-end processing of histone pre-mRNA by the U7 snRNP. SLBP continues to be associated with the stem-loop after processing, and then stimulates the translation of mature histone mRNAs into histone proteins in the cytoplasm. The RNA binding domain of SLBP is conserved through metazoa and protozoa; its binding to the histone stem-loop depends on the structure of the loop. The minimum binding site includes at least three nucleotides 5′ and two nucleotides 3′ relative to the stem-loop.

[0097] In some embodiments, EBV RNA vaccines include a coding region, at least one histone stem-loop, and optionally, a poly(A) sequence or polyadenylation signal. The poly(A) sequence or polyadenylation signal generally should enhance the expression level of the encoded protein.

[0098] The encoded protein, in some embodiments, is not a histone protein, a reporter protein (e.g. Luciferase, GFP, EGFP, β-Galactosidase, EGFP), or a marker or selection protein (e.g. alpha-Globin, Galactokinase and Xanthine:guanine phosphoribosyl transferase (GPT)).

[0099] In some embodiments, the combination of a poly(A) sequence or polyadenylation signal and at least one histone stem-loop, even though both represent alternative mechanisms in nature, acts synergistically to increase the protein expression beyond the level observed with either of the individual elements. The synergistic effect of the combination of poly(A) and at least one histone stem-loop does not depend on the order of the elements or the length of the poly(A) sequence.

[0100] In some embodiments, EBV RNA vaccines do not comprise a histone downstream element (HDE). “Histone downstream element” (HDE) includes a purine-rich polynucleotide stretch of approximately 15 to 20 nucleotides 3′ of naturally occurring stem-loops, representing the binding site for the U7 snRNA, which is involved in processing of histone pre-mRNA into mature histone mRNA. In some embodiments, the nucleic acid does not include an intron.

[0101] In some embodiments, EBV RNA vaccines may or may not contain an enhancer and/or promoter sequence, which may be modified or unmodified or which may be activated or inactivated. In some embodiments, the histone stem-loop is generally derived from histone genes, and includes an intramolecular base pairing of two neighbored partially or entirely reverse complementary sequences separated by a spacer, consisting of a short sequence, which forms the loop of the structure. The unpaired loop region is typically unable to base pair with either of the stem loop elements. It occurs more often in RNA, as is a key component of many RNA secondary structures, but may be present in single-stranded DNA as well. Stability of the stem-loop structure generally depends on the length, number of mismatches or bulges, and base composition of the paired region. In some embodiments, wobble base pairing (non-Watson-Crick base pairing) may result. In some embodiments, the at least one histone stem-loop sequence comprises a length of 15 to 45 nucleotides.

[0102] In some embodiments, EBV RNA vaccines may have one or more AU-rich sequences removed. These sequences, sometimes referred to as AURES are destabilizing sequences found in the 3′UTR. The AURES may be removed from the RNA vaccines. Alternatively the AURES may remain in the RNA vaccine.

### Signal Peptides

[0103] In some embodiments, an EBV vaccine comprises a RNA having an ORF that encodes a signal peptide fused to the EBV antigen. Signal peptides, comprising the N-terminal 15-60 amino acids of proteins, are typically needed for the translocation across the membrane on the secretory pathway and, thus, universally control the entry of most proteins both in eukaryotes and prokaryotes to the secretory pathway. In eukaryotes, the signal peptide of a nascent precursor protein (pre-protein) directs the ribosome to the rough endoplasmic reticulum (ER) membrane and initiates the transport of the growing peptide chain across it for processing. ER processing produces mature proteins, wherein the signal peptide is cleaved from precursor proteins, typically by a ER-resident signal peptidase of the host cell, or they remain uncleaved and function as a membrane anchor. A signal peptide may also facilitate the targeting of the protein to the cell membrane.

[0104] A signal peptide may have a length of 15-60 amino acids. For example, a signal peptide may have a length of 15, 16, 17, 18, 19, 20, 21, 22, 23, 24, 25, 26, 27, 28, 29, 30, 31, 32, 33, 34, 35, 36, 37, 38, 39, 40, 41, 42, 43, 44, 45, 46, 47, 48, 49, 50, 51, 52, 53, 54, 55, 56, 57, 58, 59, or 60 amino acids. In some embodiments, a signal peptide has a length of 20-60, 25-60, 30-60, 35-60, 40-60, 45-60, 50-60, 55-60, 15-55, 20-55, 25-55, 30-55, 35-55, 40-55, 45-55, 50-55, 15-50, 20-50, 25-50, 30-50, 35-50, 40-50, 45-50, 15-45, 20-45, 25-45, 30-45, 35-45, 40-45, 15-40, 20-40, 25-40, 30-40, 35-40, 15-35, 20-35, 25-35, 30-35, 15-30, 20-30, 25-30, 15-25, 20-25, or 15-20 amino acids.

[0105] Signal peptides from heterologous genes (which regulate expression of genes other than EBV antigens in nature) are known in the art and can be tested for desired properties and then incorporated into a nucleic acid of the disclosure. In some embodiments, the signal peptide is a bovine prolactin signal peptide. For example, the bovine prolactin signal peptide may comprise sequence MDSKGSSQKGSRLLLLLVVSNLLLPQGVVG (SEQ ID NO: 115). Other signal peptide sequences may also be used. For example, the signal peptide may comprise one of the following sequences: MDWTWILFLVAAATRVHS (SEQ ID NO: 116); METPAQLLFLLLLWLPDTTG (SEQ ID NO: 117); MLGSNSGQRVVFTILLLLVAPAYS (SEQ ID NO: 118); MKCLLYLAFLFIGVNCA (SEQ ID NO: 119); MWLVSLAIVTACAGA (SEQ ID NO: 120).

### Fusion Proteins

[0106] In some embodiments, an EBV RNA vaccine of the present disclosure includes an RNA encoding an antigenic fusion protein. Thus, the encoded antigen or antigens may include two or more proteins (e.g., protein and/or protein fragment) joined together. Alternatively, the protein to which a protein antigen is fused does not promote a strong immune response to itself, but rather to the EBV antigen. Antigenic fusion proteins, in some embodiments, retain the functional property from each original protein.

### Scaffold Moieties

[0107] The RNA (e.g., mRNA) vaccines as provided herein, in some embodiments, encode fusion proteins which comprise EBV antigens linked to scaffold moieties. In some embodiments, such scaffold moieties impart desired properties to an antigen encoded by a nucleic acid of the disclosure. For example scaffold proteins may improve the immunogenicity of an antigen, e.g., by altering the structure of the antigen, altering the uptake and processing of the antigen, and/or causing the antigen to bind to a binding partner.

[0108] In some embodiments, the scaffold moiety is protein that can self-assemble into protein nanoparticles that are highly symmetric, stable, and structurally organized, with diameters of 10-150 nm, a highly suitable size range for optimal interactions with various cells of the immune system. In some embodiments, viral proteins or virus-like particles can be used to form stable nanoparticle structures. Examples of such viral proteins are known in the art. For example, in some embodiments, the scaffold moiety is a hepatitis B surface antigen (HBsAg). HBsAg forms spherical particles with an average diameter of ˜22 nm and which lacked nucleic acid and hence are non-infectious (Lopez-Sagaseta, J. et al. Computational and Structural Biotechnology Journal 14 (2016) 58-68). In some embodiments, the scaffold moiety is a hepatitis B core antigen (HBcAg) self-assembles into particles of 24-31 nm diameter, which resembled the viral cores obtained from HBV-infected human liver. HBcAg produced in self-assembles into two classes of differently sized nanoparticles of 300 Å and 360 Å diameter, corresponding to 180 or 240 protomers. In some embodiments an EBV antigen is fused to HBsAG or HBcAG to facilitate self-assembly of nanoparticles displaying the EBV antigen.

[0109] In another embodiment, bacterial protein platforms may be used. Non-limiting examples of these self-assembling proteins include ferritin, lumazine and encapsulin.

[0110] Ferritin is a protein whose main function is intracellular iron storage. Ferritin is made of 24 subunits, each composed of a four-alpha-helix bundle, that self-assemble in a quaternary structure with octahedral symmetry (Cho K. J. et al. J Mol Biol. 2009; 390:83-98). Several high-resolution structures of ferritin have been determined, confirming that Helicobacter pylori ferritin is made of 24 identical protomers, whereas in animals, there are ferritin light and heavy chains that can assemble alone or combine with different ratios into particles of 24 subunits (Granier T. et al. J Biol Inorg Chem. 2003; 8:105-111; Lawson D. M. et al. Nature. 1991; 349:541-544). Ferritin self-assembles into nanoparticles with robust thermal and chemical stability. Thus, the ferritin nanoparticle is well-suited to carry and expose antigens.

[0111] Lumazine synthase (LS) is also well-suited as a nanoparticle platform for antigen display. LS, which is responsible for the penultimate catalytic step in the biosynthesis of riboflavin, is an enzyme present in a broad variety of organisms, including archaea, bacteria, fungi, plants, and eubacteria (Weber S. E. Flavins and Flavoproteins. Methods and Protocols, Series: Methods in Molecular Biology. 2014). The LS monomer is 150 amino acids long, and consists of beta-sheets along with tandem alpha-helices flanking its sides. A number of different quaternary structures have been reported for LS, illustrating its morphological versatility: from homopentamers up to symmetrical assemblies of 12 pentamers forming capsids of 150 Å diameter. Even LS cages of more than 100 subunits have been described (Zhang X. et al. J Mol Biol. 2006; 362:753-770).

[0112] Encapsulin, a novel protein cage nanoparticle isolated from thermophile Thermotoga maritima, may also be used as a platform to present antigens on the surface of self-assembling nanoparticles. Encapsulin is assembled from 60 copies of identical 31 kDa monomers having a thin and icosahedral T=1 symmetric cage structure with interior and exterior diameters of 20 and 24 nm, respectively (Sutter M. et al. Nat Struct Mol Biol. 2008, 15: 939-947). Although the exact function of encapsulin in T. maritima is not clearly understood yet, its crystal structure has been recently solved and its function was postulated as a cellular compartment that encapsulates proteins such as DyP (Dye decolorizing peroxidase) and Flp (Ferritin like protein), which are involved in oxidative stress responses (Rahmanpour R. et al. FEBS J. 2013, 280: 2097-2104).

### Linkers and Cleavable Peptides

[0113] In some embodiments, the mRNAs of the disclosure encode more than one polypeptide, referred to herein as fusion proteins. In some embodiments, the mRNA further encodes a linker located between at least one or each domain of the fusion protein. The linker can be, for example, a cleavable linker or protease-sensitive linker. In some embodiments, the linker is selected from the group consisting of F2A linker, P2A linker, T2A linker, E2A linker, and combinations thereof. This family of self-cleaving peptide linkers, referred to as 2A peptides, has been described in the art (see for example, Kim, J. H. et al. (2011) PLoS ONE 6:e18556). In some embodiments, the linker is an F2A linker. In some embodiments, the linker is a GGGS linker or a GGGGS linker, for example, including one or more (e.g., 1, 2, 3, 4, or more) repeat GGGS (SEQ ID NO: 226) or GGGGS (SEQ ID NO: 227) sequences (e.g., GGGGS GGGGS GGGGS (SEQ ID NO: 224) and/or GGGGS GGGGS GGGGS GGGGS (SEQ ID NO: 225)). In some embodiments, the fusion protein contains three domains with intervening linkers, having the structure: domain-linker-domain-linker-domain.

[0114] Cleavable linkers known in the art may be used in connection with the disclosure. Exemplary such linkers include: F2A linkers, T2A linkers, P2A linkers, E2A linkers (See, e.g., WO2017/127750). The skilled artisan will appreciate that other art-recognized linkers may be suitable for use in the constructs of the disclosure (e.g., encoded by the nucleic acids of the disclosure). The skilled artisan will likewise appreciate that other polycistronic constructs (mRNA encoding more than one antigen/polypeptide separately within the same molecule) may be suitable for use as provided herein.

### Sequence Optimization

[0115] In some embodiments, an ORF encoding an antigen of the disclosure is codon optimized. Codon optimization methods are known in the art. For example, an ORF of any one or more of the sequences provided herein may be codon optimized. Codon optimization, in some embodiments, may be used to match codon frequencies in target and host organisms to ensure proper folding; bias GC content to increase mRNA stability or reduce secondary structures; minimize tandem repeat codons or base runs that may impair gene construction or expression; customize transcriptional and translational control regions; insert or remove protein trafficking sequences; remove/add post translation modification sites in encoded protein (e.g., glycosylation sites); add, remove or shuffle protein domains; insert or delete restriction sites; modify ribosome binding sites and mRNA degradation sites; adjust translational rates to allow the various domains of the protein to fold properly; or reduce or eliminate problem secondary structures within the polynucleotide. Codon optimization tools, algorithms and services are known in the art—non-limiting examples include services from GeneArt (Life Technologies), DNA2.0 (Menlo Park Calif.) and/or proprietary methods. In some embodiments, the open reading frame (ORF) sequence is optimized using optimization algorithms.

[0116] In some embodiments, a codon optimized sequence shares less than 95% sequence identity to a naturally-occurring or wild-type sequence ORF (e.g., a naturally-occurring or wild-type mRNA sequence encoding an EBV antigen). In some embodiments, a codon optimized sequence shares less than 90% sequence identity to a naturally-occurring or wild-type sequence (e.g., a naturally-occurring or wild-type mRNA sequence encoding an EBV antigen). In some embodiments, a codon optimized sequence shares less than 85% sequence identity to a naturally-occurring or wild-type sequence (e.g., a naturally-occurring or wild-type mRNA sequence encoding an EBV antigen). In some embodiments, a codon optimized sequence shares less than 80% sequence identity to a naturally-occurring or wild-type sequence (e.g., a naturally-occurring or wild-type mRNA sequence encoding an EBV antigen). In some embodiments, a codon optimized sequence shares less than 75% sequence identity to a naturally-occurring or wild-type sequence (e.g., a naturally-occurring or wild-type mRNA sequence encoding an EBV antigen).

[0117] In some embodiments, a codon optimized sequence shares between 65% and 85% (e.g., between about 67% and about 85% or between about 67% and about 80%) sequence identity to a naturally-occurring or wild-type sequence (e.g., a naturally-occurring or wild-type mRNA sequence encoding an EBV antigen). In some embodiments, a codon optimized sequence shares between 65% and 75% or about 80% sequence identity to a naturally-occurring or wild-type sequence (e.g., a naturally-occurring or wild-type mRNA sequence encoding an EBV antigen).

[0118] In some embodiments, a codon-optimized sequence encodes an antigen that is as immunogenic as, or more immunogenic than (e.g., at least 10%, at least 20%, at least 30%, at least 40%, at least 50%, at least 100%, or at least 200% more), than an EBV antigen encoded by a non-codon-optimized sequence.

[0119] When transfected into mammalian host cells, the modified mRNAs have a stability of between 12-18 hours, or greater than 18 hours, e.g., 24, 36, 48, 60, 72, or greater than 72 hours and are capable of being expressed by the mammalian host cells.

[0120] In some embodiments, a codon optimized RNA may be one in which the levels of G/C are enhanced. The G/C-content of nucleic acid molecules (e.g., mRNA) may influence the stability of the RNA. RNA having an increased amount of guanine (G) and/or cytosine (C) residues may be functionally more stable than RNA containing a large amount of adenine (A) and thymine (T) or uracil (U) nucleotides. As an example, WO02/098443 discloses a pharmaceutical composition containing an mRNA stabilized by sequence modifications in the translated region. Due to the degeneracy of the genetic code, the modifications work by substituting existing codons for those that promote greater RNA stability without changing the resulting amino acid. The approach is limited to coding regions of the RNA.

### Chemically Unmodified Nucleotides

[0121] In some embodiments, at least one RNA (e.g., mRNA) of an EBV vaccines of the present disclosure is not chemically modified and comprises the standard ribonucleotides consisting of adenosine, guanosine, cytosine and uridine. In some embodiments, nucleotides and nucleosides of the present disclosure comprise standard nucleoside residues such as those present in transcribed RNA (e.g. A, G, C, or U). In some embodiments, nucleotides and nucleosides of the present disclosure comprise standard deoxyribonucleosides such as those present in DNA (e.g. dA, dG, dC, or dT).

### Chemical Modifications

[0122] EBV RNA vaccines of the present disclosure comprise, in some embodiments, at least one nucleic acid (e.g., RNA) having an open reading frame encoding at least one EBV antigen, wherein the nucleic acid comprises nucleotides and/or nucleosides that can be standard (unmodified) or modified as is known in the art. In some embodiments, nucleotides and nucleosides of the present disclosure comprise modified nucleotides or nucleosides. Such modified nucleotides and nucleosides can be naturally-occurring modified nucleotides and nucleosides or non-naturally occurring modified nucleotides and nucleosides. Such modifications can include those at the sugar, backbone, or nucleobase portion of the nucleotide and/or nucleoside as are recognized in the art.

[0123] In some embodiments, a naturally-occurring modified nucleotide or nucleotide of the disclosure is one as is generally known or recognized in the art. Non-limiting examples of such naturally occurring modified nucleotides and nucleotides can be found, inter alia, in the widely recognized MODOMICS database.

[0124] In some embodiments, a non-naturally occurring modified nucleotide or nucleoside of the disclosure is one as is generally known or recognized in the art. Non-limiting examples of such non-naturally occurring modified nucleotides and nucleosides can be found, inter alia, in published US application Nos. PCT/US2012/058519; PCT/US2013/075177; PCT/US2014/058897; PCT/US2014/058891; PCT/US2014/070413; PCT/US2015/36773; PCT/US2015/36759; PCT/US2015/36771; or PCT/IB2017/051367 all of which are incorporated by reference herein.

[0125] Hence, nucleic acids of the disclosure (e.g., DNA nucleic acids and RNA nucleic acids, such as mRNA nucleic acids) can comprise standard nucleotides and nucleosides, naturally-occurring nucleotides and nucleosides, non-naturally-occurring nucleotides and nucleosides, or any combination thereof.

[0126] Nucleic acids of the disclosure (e.g., DNA nucleic acids and RNA nucleic acids, such as mRNA nucleic acids), in some embodiments, comprise various (more than one) different types of standard and/or modified nucleotides and nucleosides. In some embodiments, a particular region of a nucleic acid contains one, two or more (optionally different) types of standard and/or modified nucleotides and nucleosides.

[0127] In some embodiments, a modified RNA nucleic acid (e.g., a modified mRNA nucleic acid), introduced to a cell or organism, exhibits reduced degradation in the cell or organism, respectively, relative to an unmodified nucleic acid comprising standard nucleotides and nucleosides.

[0128] In some embodiments, a modified RNA nucleic acid (e.g., a modified mRNA nucleic acid), introduced into a cell or organism, may exhibit reduced immunogenicity in the cell or organism, respectively (e.g., a reduced innate response) relative to an unmodified nucleic acid comprising standard nucleotides and nucleosides.

[0129] Nucleic acids (e.g., RNA nucleic acids, such as mRNA nucleic acids), in some embodiments, comprise non-natural modified nucleotides that are introduced during synthesis or post-synthesis of the nucleic acids to achieve desired functions or properties. The modifications may be present on internucleotide linkages, purine or pyrimidine bases, or sugars. The modification may be introduced with chemical synthesis or with a polymerase enzyme at the terminal of a chain or anywhere else in the chain. Any of the regions of a nucleic acid may be chemically modified.

[0130] The present disclosure provides for modified nucleosides and nucleotides of a nucleic acid (e.g., RNA nucleic acids, such as mRNA nucleic acids). A “nucleoside” refers to a compound containing a sugar molecule (e.g., a pentose or ribose) or a derivative thereof in combination with an organic base (e.g., a purine or pyrimidine) or a derivative thereof (also referred to herein as “nucleobase”). A “nucleotide” refers to a nucleoside, including a phosphate group. Modified nucleotides may by synthesized by any useful method, such as, for example, chemically, enzymatically, or recombinantly, to include one or more modified or non-natural nucleosides. Nucleic acids can comprise a region or regions of linked nucleosides. Such regions may have variable backbone linkages. The linkages can be standard phosphodiester linkages, in which case the nucleic acids would comprise regions of nucleotides.

[0131] Modified nucleotide base pairing encompasses not only the standard adenosine-thymine, adenosine-uracil, or guanosine-cytosine base pairs, but also base pairs formed between nucleotides and/or modified nucleotides comprising non-standard or modified bases, wherein the arrangement of hydrogen bond donors and hydrogen bond acceptors permits hydrogen bonding between a non-standard base and a standard base or between two complementary non-standard base structures, such as, for example, in those nucleic acids having at least one chemical modification. One example of such non-standard base pairing is the base pairing between the modified nucleotide inosine and adenine, cytosine or uracil. Any combination of base/sugar or linker may be incorporated into nucleic acids of the present disclosure.

[0132] In some embodiments, modified nucleobases in nucleic acids (e.g., RNA nucleic acids, such as mRNA nucleic acids) comprise 1-methyl-pseudouridine (m1ψ), 1-ethyl-pseudouridine (e1ψ), 5-methoxy-uridine (mo5U), 5-methyl-cytidine (m5C), and/or pseudouridine (ψ). In some embodiments, modified nucleobases in nucleic acids (e.g., RNA nucleic acids, such as mRNA nucleic acids) comprise 5-methoxymethyl uridine, 5-methylthio uridine, 1-methoxymethyl pseudouridine, 5-methyl cytidine, and/or 5-methoxy cytidine. In some embodiments, the polyribonucleotide includes a combination of at least two (e.g., 2, 3, 4 or more) of any of the aforementioned modified nucleobases, including but not limited to chemical modifications.

[0133] In some embodiments, a RNA nucleic acid of the disclosure comprises 1-methyl-pseudouridine (m1ψ) substitutions at one or more or all uridine positions of the nucleic acid.

[0134] In some embodiments, a RNA nucleic acid of the disclosure comprises 1-methyl-pseudouridine (m1ψ) substitutions at one or more or all uridine positions of the nucleic acid and 5-methyl cytidine substitutions at one or more or all cytidine positions of the nucleic acid.

[0135] In some embodiments, a RNA nucleic acid of the disclosure comprises pseudouridine (ψ) substitutions at one or more or all uridine positions of the nucleic acid.

[0136] In some embodiments, a RNA nucleic acid of the disclosure comprises pseudouridine (ψ) substitutions at one or more or all uridine positions of the nucleic acid and 5-methyl cytidine substitutions at one or more or all cytidine positions of the nucleic acid.

[0137] In some embodiments, a RNA nucleic acid of the disclosure comprises uridine at one or more or all uridine positions of the nucleic acid.

[0138] In some embodiments, nucleic acids (e.g., RNA nucleic acids, such as mRNA nucleic acids) are uniformly modified (e.g., fully modified, modified throughout the entire sequence) for a particular modification. For example, a nucleic acid can be uniformly modified with 1-methyl-pseudouridine, meaning that all uridine residues in the mRNA sequence are replaced with 1-methyl-pseudouridine. Similarly, a nucleic acid can be uniformly modified for any type of nucleoside residue present in the sequence by replacement with a modified residue such as those set forth above.

[0139] The nucleic acids of the present disclosure may be partially or fully modified along the entire length of the molecule. For example, one or more or all or a given type of nucleotide (e.g., purine or pyrimidine, or any one or more or all of A, G, U, C) may be uniformly modified in a nucleic acid of the disclosure, or in a predetermined sequence region thereof (e.g., in the mRNA including or excluding the polyA tail). In some embodiments, all nucleotides X in a nucleic acid of the present disclosure (or in a sequence region thereof) are modified nucleotides, wherein X may be any one of nucleotides A, G, U, C, or any one of the combinations A+G, A+U, A+C, G+U, G+C, U+C, A+G+U, A+G+C, G+U+C or A+G+C.

[0140] The nucleic acid may contain from about 1% to about 100% modified nucleotides (either in relation to overall nucleotide content, or in relation to one or more types of nucleotide, i.e., any one or more of A, G, U or C) or any intervening percentage (e.g., from 1% to 20%, from 1% to 25%, from 1% to 50%, from 1% to 60%, from 1% to 70%, from 1% to 80%, from 1% to 90%, from 1% to 95%, from 10% to 20%, from 10% to 25%, from 10% to 50%, from 10% to 60%, from 10% to 70%, from 10% to 80%, from 10% to 90%, from 10% to 95%, from 10% to 100%, from 20% to 25%, from 20% to 50%, from 20% to 60%, from 20% to 70%, from 20% to 80%, from 20% to 90%, from 20% to 95%, from 20% to 100%, from 50% to 60%, from 50% to 70%, from 50% to 80%, from 50% to 90%, from 50% to 95%, from 50% to 100%, from 70% to 80%, from 70% to 90%, from 70% to 95%, from 70% to 100%, from 80% to 90%, from 80% to 95%, from 80% to 100%, from 90% to 95%, from 90% to 100%, and from 95% to 100%). It will be understood that any remaining percentage is accounted for by the presence of unmodified A, G, U, or C.

[0141] The nucleic acids may contain at a minimum 1% and at maximum 100% modified nucleotides, or any intervening percentage, such as at least 5% modified nucleotides, at least 10% modified nucleotides, at least 25% modified nucleotides, at least 50% modified nucleotides, at least 80% modified nucleotides, or at least 90% modified nucleotides. For example, the nucleic acids may contain a modified pyrimidine such as a modified uracil or cytosine. In some embodiments, at least 5%, at least 10%, at least 25%, at least 50%, at least 80%, at least 90% or 100% of the uracil in the nucleic acid is replaced with a modified uracil (e.g., a 5-substituted uracil). The modified uracil can be replaced by a compound having a single unique structure, or can be replaced by a plurality of compounds having different structures (e.g., 2, 3, 4 or more unique structures). In some embodiments, at least 5%, at least 10%, at least 25%, at least 50%, at least 80%, at least 90% or 100% of the cytosine in the nucleic acid is replaced with a modified cytosine (e.g., a 5-substituted cytosine). The modified cytosine can be replaced by a compound having a single unique structure, or can be replaced by a plurality of compounds having different structures (e.g., 2, 3, 4 or more unique structures).

### Untranslated Regions (UTRs)

[0142] The nucleic acids of the present disclosure may comprise one or more regions or parts which act or function as an untranslated region. Where nucleic acids are designed to encode at least one antigen of interest, the nucleic may comprise one or more of these untranslated regions (UTRs). Wild-type untranslated regions of a nucleic acid are transcribed but not translated. In mRNA, the 5′ UTR starts at the transcription start site and continues to the start codon but does not include the start codon; whereas, the 3′ UTR starts immediately following the stop codon and continues until the transcriptional termination signal. There is growing body of evidence about the regulatory roles played by the UTRs in terms of stability of the nucleic acid molecule and translation. The regulatory features of a UTR can be incorporated into the polynucleotides of the present disclosure to, among other things, enhance the stability of the molecule. The specific features can also be incorporated to ensure controlled down-regulation of the transcript in case they are misdirected to undesired organs sites. A variety of 5′UTR and 3′UTR sequences are known and available in the art.

[0143] A 5′ UTR is region of an mRNA that is directly upstream (5′) from the start codon (the first codon of an mRNA transcript translated by a ribosome). A 5′ UTR does not encode a protein (is non-coding). Natural 5′UTRs have features that play roles in translation initiation. They harbor signatures like Kozak sequences which are commonly known to be involved in the process by which the ribosome initiates translation of many genes. Kozak sequences have the consensus CCR(A/G)CCAUGG (SEQ ID NO: 121), where R is a purine (adenine or guanine) three bases upstream of the start codon (AUG), which is followed by another ‘G’.5′UTR also have been known to form secondary structures which are involved in elongation factor binding.

[0144] In some embodiments of the disclosure, a 5′ UTR is a heterologous UTR, i.e., is a UTR found in nature associated with a different ORF. In another embodiment, a 5′ UTR is a synthetic UTR, i.e., does not occur in nature. Synthetic UTRs include UTRs that have been mutated to improve their properties, e.g., which increase gene expression as well as those which are completely synthetic. Exemplary 5′ UTRs include Xenopus or human derived a-globin or b-globin (U.S. Pat. Nos. 8,278,063; 9,012,219), human cytochrome b-245 a polypeptide, and hydroxysteroid (17b) dehydrogenase, and Tobacco etch virus (U.S. Pat. Nos. 8,278,063, 9,012,219). CMV immediate-early 1 (IE1) gene (US20140206753, WO2013/185069), the sequence GGGAUCCUACC (SEQ ID NO: 122) (WO2014/144196) may also be used. In another embodiment, 5′ UTR of a TOP gene is a 5′ UTR of a TOP gene lacking the 5′ TOP motif (the oligopyrimidine tract) (e.g., WO2015/101414, WO2015/101415, WO2015/062738, WO2015/024667, WO2015/024668; 5′ UTR element derived from ribosomal protein Large 32 (L32) gene (WO2015/101414, WO2015/101415, WO2015/062738), 5′ UTR element derived from the 5′UTR of an hydroxysteroid (1743) dehydrogenase 4 gene (HSD17B4) (WO2015/024667), or a 5′ UTR element derived from the 5′ UTR of ATP5A1 (WO2015/024667) can be used. In some embodiments, an internal ribosome entry site (IRES) is used instead of a 5′ UTR.

[0145] In some embodiments, a 5′ UTR of the present disclosure comprises a sequence selected from SEQ ID NO: 1 and SEQ ID NO: 104.

[0146] A 3′ UTR is region of an mRNA that is directly downstream (3′) from the stop codon (the codon of an mRNA transcript that signals a termination of translation). A 3′ UTR does not encode a protein (is non-coding). Natural or wild type 3′ UTRs are known to have stretches of adenosines and uridines embedded in them. These AU rich signatures are particularly prevalent in genes with high rates of turnover. Based on their sequence features and functional properties, the AU rich elements (AREs) can be separated into three classes (Chen et al, 1995): Class I AREs contain several dispersed copies of an AUUUA motif within U-rich regions. C-Myc and MyoD contain class I AREs. Class II AREs possess two or more overlapping UUAUUUA(U/A)(U/A) (SEQ ID NO: 123) nonamers. Molecules containing this type of AREs include GM-CSF and TNF-a. Class III ARES are less well defined. These U rich regions do not contain an AUUUA motif. c-Jun and Myogenin are two well-studied examples of this class. Most proteins binding to the AREs are known to destabilize the messenger, whereas members of the ELAV family, most notably HuR, have been documented to increase the stability of mRNA. HuR binds to AREs of all the three classes. Engineering the HuR specific binding sites into the 3′ UTR of nucleic acid molecules will lead to HuR binding and thus, stabilization of the message in vivo.

[0147] Introduction, removal or modification of 3′ UTR AU rich elements (AREs) can be used to modulate the stability of nucleic acids (e.g., RNA) of the disclosure. When engineering specific nucleic acids, one or more copies of an ARE can be introduced to make nucleic acids of the disclosure less stable and thereby curtail translation and decrease production of the resultant protein. Likewise, AREs can be identified and removed or mutated to increase the intracellular stability and thus increase translation and production of the resultant protein. Transfection experiments can be conducted in relevant cell lines, using nucleic acids of the disclosure and protein production can be assayed at various time points post-transfection. For example, cells can be transfected with different ARE-engineering molecules and by using an ELISA kit to the relevant protein and assaying protein produced at 6 hour, 12 hour, 24 hour, 48 hour, and 7 days post-transfection.

[0148] 3′ UTRs may be heterologous or synthetic. With respect to 3′ UTRs, globin UTRs, including Xenopus β-globin UTRs and human β-globin UTRs are known in the art (U.S. Pat. Nos. 8,278,063, 9,012,219, US20110086907). A modified β-globin construct with enhanced stability in some cell types by cloning two sequential human β-globin 3′UTRs head to tail has been developed and is well known in the art (US2012/0195936, WO2014/071963). In addition a2-globin, a1-globin, UTRs and mutants thereof are also known in the art (WO2015/101415, WO2015/024667). Other 3′ UTRs described in the mRNA constructs in the non-patent literature include CYBA (Ferizi et al., 2015) and albumin (Thess et al., 2015). Other exemplary 3′ UTRs include that of bovine or human growth hormone (wild type or modified) (WO2013/185069, US20140206753, WO2014/152774), rabbit βglobin and hepatitis B virus (HBV), α-globin 3′ UTR and Viral VEEV 3′ UTR sequences are also known in the art. In some embodiments, the sequence UUUGAAUU (WO2014/144196) is used. In some embodiments, 3′ UTRs of human and mouse ribosomal protein are used. Other examples include rps9 3′UTR (WO2015/101414), FIG. 4 (WO2015/101415), and human albumin 7 (WO2015/101415).

[0149] In some embodiments, a 3′ UTR of the present disclosure comprises a sequence selected from SEQ ID NO: 3 and SEQ ID NO: 106.

[0150] Those of ordinary skill in the art will understand that 5′UTRs that are heterologous or synthetic may be used with any desired 3′ UTR sequence. For example, a heterologous 5′UTR may be used with a synthetic 3′UTR with a heterologous 3″ UTR.

[0151] Non-UTR sequences may also be used as regions or subregions within a nucleic acid. For example, introns or portions of introns sequences may be incorporated into regions of nucleic acid of the disclosure. Incorporation of intronic sequences may increase protein production as well as nucleic acid levels.

[0152] Combinations of features may be included in flanking regions and may be contained within other features. For example, the ORF may be flanked by a 5′ UTR which may contain a strong Kozak translational initiation signal and/or a 3′ UTR which may include an oligo(dT) sequence for templated addition of a poly-A tail. 5′ UTR may comprise a first polynucleotide fragment and a second polynucleotide fragment from the same and/or different genes such as the 5′ UTRs described in US Patent Application Publication No. 20100293625 and PCT/US2014/069155, herein incorporated by reference in its entirety.

[0153] It should be understood that any UTR from any gene may be incorporated into the regions of a nucleic acid. Furthermore, multiple wild-type UTRs of any known gene may be utilized. It is also within the scope of the present disclosure to provide artificial UTRs which are not variants of wild type regions. These UTRs or portions thereof may be placed in the same orientation as in the transcript from which they were selected or may be altered in orientation or location. Hence a 5′ or 3′ UTR may be inverted, shortened, lengthened, made with one or more other 5′ UTRs or 3′ UTRs. As used herein, the term “altered” as it relates to a UTR sequence, means that the UTR has been changed in some way in relation to a reference sequence. For example, a 3′ UTR or 5′ UTR may be altered relative to a wild-type or native UTR by the change in orientation or location as taught above or may be altered by the inclusion of additional nucleotides, deletion of nucleotides, swapping or transposition of nucleotides. Any of these changes producing an “altered” UTR (whether 3′ or 5′) comprise a variant UTR.

[0154] In some embodiments, a double, triple or quadruple UTR such as a 5′ UTR or 3′ UTR may be used. As used herein, a “double” UTR is one in which two copies of the same UTR are encoded either in series or substantially in series. For example, a double beta-globin 3′ UTR may be used as described in US Patent publication 20100129877, the contents of which are incorporated herein by reference in its entirety.

[0155] It is also within the scope of the present disclosure to have patterned UTRs. As used herein “patterned UTRs” are those UTRs which reflect a repeating or alternating pattern, such as ABABAB or AABBAABBAABB or ABCABCABC or variants thereof repeated once, twice, or more than 3 times. In these patterns, each letter, A, B, or C represent a different UTR at the nucleotide level.

[0156] In some embodiments, flanking regions are selected from a family of transcripts whose proteins share a common function, structure, feature or property. For example, polypeptides of interest may belong to a family of proteins which are expressed in a particular cell, tissue or at some time during development. The UTRs from any of these genes may be swapped for any other UTR of the same or different family of proteins to create a new polynucleotide. As used herein, a “family of proteins” is used in the broadest sense to refer to a group of two or more polypeptides of interest which share at least one function, structure, feature, localization, origin, or expression pattern.

[0157] The untranslated region may also include translation enhancer elements (TEE). As a non-limiting example, the TEE may include those described in US Application No. 20090226470, herein incorporated by reference in its entirety, and those known in the art.

### In Vitro Transcription of RNA

[0158] cDNA encoding the polynucleotides described herein may be transcribed using an in vitro transcription (IVT) system. In vitro transcription of RNA is known in the art and is described in International Publication WO/2014/152027, which is incorporated by reference herein in its entirety.

[0159] In some embodiments, the RNA transcript is generated using a non-amplified, linearized DNA template in an in vitro transcription reaction to generate the RNA transcript. In some embodiments, the template DNA is isolated DNA. In some embodiments, the template DNA is cDNA. In some embodiments, the cDNA is formed by reverse transcription of a RNA polynucleotide, for example, but not limited to EBV RNA, e.g. EBV mRNA. In some embodiments, cells, e.g., bacterial cells, e.g., E. coli, e.g., DH-1 cells are transfected with the plasmid DNA template. In some embodiments, the transfected cells are cultured to replicate the plasmid DNA which is then isolated and purified. In some embodiments, the DNA template includes a RNA polymerase promoter, e.g., a T7 promoter located 5′ to and operably linked to the gene of interest.

[0160] In some embodiments, an in vitro transcription template encodes a 5′ untranslated (UTR) region, contains an open reading frame, and encodes a 3′ UTR and a polyA tail. The particular nucleic acid sequence composition and length of an in vitro transcription template will depend on the mRNA encoded by the template.

[0161] A “5′ untranslated region” (UTR) refers to a region of an mRNA that is directly upstream (i.e., 5′) from the start codon (i.e., the first codon of an mRNA transcript translated by a ribosome) that does not encode a polypeptide. When RNA transcripts are being generated, the 5′ UTR may comprise a promoter sequence. Such promoter sequences are known in the art. It should be understood that such promoter sequences will not be present in a vaccine of the disclosure.

[0162] A “3′ untranslated region” (UTR) refers to a region of an mRNA that is directly downstream (i.e., 3′) from the stop codon (i.e., the codon of an mRNA transcript that signals a termination of translation) that does not encode a polypeptide.

[0163] An “open reading frame” is a continuous stretch of DNA beginning with a start codon (e.g., methionine (ATG)), and ending with a stop codon (e.g., TAA, TAG or TGA) and encodes a polypeptide.

[0164] A “polyA tail” is a region of mRNA that is downstream, e.g., directly downstream (i.e., 3′), from the 3′ UTR that contains multiple, consecutive adenosine monophosphates. A polyA tail may contain 10 to 300 adenosine monophosphates. For example, a polyA tail may contain 10, 20, 30, 40, 50, 60, 70, 80, 90, 100, 110, 120, 130, 140, 150, 160, 170, 180, 190, 200, 210, 220, 230, 240, 250, 260, 270, 280, 290 or 300 adenosine monophosphates. In some embodiments, a polyA tail contains 50 to 250 adenosine monophosphates. In a relevant biological setting (e.g., in cells, in vivo) the poly(A) tail functions to protect mRNA from enzymatic degradation, e.g., in the cytoplasm, and aids in transcription termination, and/or export of the mRNA from the nucleus and translation.

[0165] In some embodiments, a nucleic acid includes 200 to 3,000 nucleotides. For example, a nucleic acid may include 200 to 500, 200 to 1000, 200 to 1500, 200 to 3000, 500 to 1000, 500 to 1500, 500 to 2000, 500 to 3000, 1000 to 1500, 1000 to 2000, 1000 to 3000, 1500 to 3000, or 2000 to 3000 nucleotides).

[0166] An in vitro transcription system typically comprises a transcription buffer, nucleotide triphosphates (NTPs), an RNase inhibitor and a polymerase.

[0167] The NTPs may be manufactured in house, may be selected from a supplier, or may be synthesized as described herein. The NTPs may be selected from, but are not limited to, those described herein including natural and unnatural (modified) NTPs.

[0168] Any number of RNA polymerases or variants may be used in the method of the present disclosure. The polymerase may be selected from, but is not limited to, a phage RNA polymerase, e.g., a T7 RNA polymerase, a T3 RNA polymerase, a SP6 RNA polymerase, and/or mutant polymerases such as, but not limited to, polymerases able to incorporate modified nucleic acids and/or modified nucleotides, including chemically modified nucleic acids and/or nucleotides. Some embodiments exclude the use of DNase.

[0169] In some embodiments, the RNA transcript is capped via enzymatic capping. In some embodiments, the RNA comprises 5′ terminal cap, for example, 7mG(5′)ppp(5′)NlmpNp.

### Chemical Synthesis

[0170] Solid-Phase Chemical Synthesis.

[0171] Nucleic acids the present disclosure may be manufactured in whole or in part using solid phase techniques. Solid-phase chemical synthesis of nucleic acids is an automated method wherein molecules are immobilized on a solid support and synthesized step by step in a reactant solution. Solid-phase synthesis is useful in site-specific introduction of chemical modifications in the nucleic acid sequences.

[0172] Liquid Phase Chemical Synthesis.

[0173] The synthesis of nucleic acids of the present disclosure by the sequential addition of monomer building blocks may be carried out in a liquid phase.

[0174] Combination of Synthetic Methods.

[0175] The synthetic methods discussed above each has its own advantages and limitations. Attempts have been conducted to combine these methods to overcome the limitations. Such combinations of methods are within the scope of the present disclosure. The use of solid-phase or liquid-phase chemical synthesis in combination with enzymatic ligation provides an efficient way to generate long chain nucleic acids that cannot be obtained by chemical synthesis alone.

### Ligation of Nucleic Acid Regions or Subregions

[0176] Assembling nucleic acids by a ligase may also be used. DNA or RNA ligases promote intermolecular ligation of the 5′ and 3′ ends of polynucleotide chains through the formation of a phosphodiester bond. Nucleic acids such as chimeric polynucleotides and/or circular nucleic acids may be prepared by ligation of one or more regions or subregions. DNA fragments can be joined by a ligase catalyzed reaction to create recombinant DNA with different functions. Two oligodeoxynucleotides, one with a 5′ phosphoryl group and another with a free 3′ hydroxyl group, serve as substrates for a DNA ligase.

### Purification

[0177] Purification of the nucleic acids described herein may include, but is not limited to, nucleic acid clean-up, quality assurance and quality control. Clean-up may be performed by methods known in the arts such as, but not limited to, AGENCOURT® beads (Beckman Coulter Genomics, Danvers, Mass.), poly-T beads, LNATM oligo-T capture probes (EXIQON® Inc, Vedbaek, Denmark) or HPLC based purification methods such as, but not limited to, strong anion exchange HPLC, weak anion exchange HPLC, reverse phase HPLC (RP-HPLC), and hydrophobic interaction HPLC (HIC-HPLC). The term “purified” when used in relation to a nucleic acid such as a “purified nucleic acid” refers to one that is separated from at least one contaminant. A “contaminant” is any substance that makes another unfit, impure or inferior. Thus, a purified nucleic acid (e.g., DNA and RNA) is present in a form or setting different from that in which it is found in nature, or a form or setting different from that which existed prior to subjecting it to a treatment or purification method.

[0178] A quality assurance and/or quality control check may be conducted using methods such as, but not limited to, gel electrophoresis, UV absorbance, or analytical HPLC.

[0179] In some embodiments, the nucleic acids may be sequenced by methods including, but not limited to reverse-transcriptase-PCR.

### Quantification

[0180] In some embodiments, the nucleic acids of the present invention may be quantified in exosomes or when derived from one or more bodily fluid. Bodily fluids include peripheral blood, serum, plasma, ascites, urine, cerebrospinal fluid (CSF), sputum, saliva, bone marrow, synovial fluid, aqueous humor, amniotic fluid, cerumen, breast milk, broncheoalveolar lavage fluid, semen, prostatic fluid, cowper's fluid or pre-ejaculatory fluid, sweat, fecal matter, hair, tears, cyst fluid, pleural and peritoneal fluid, pericardial fluid, lymph, chyme, chyle, bile, interstitial fluid, menses, pus, sebum, vomit, vaginal secretions, mucosal secretion, stool water, pancreatic juice, lavage fluids from sinus cavities, bronchopulmonary aspirates, blastocyl cavity fluid, and umbilical cord blood. Alternatively, exosomes may be retrieved from an organ selected from the group consisting of lung, heart, pancreas, stomach, intestine, bladder, kidney, ovary, testis, skin, colon, breast, prostate, brain, esophagus, liver, and placenta.

[0181] Assays may be performed using construct specific probes, cytometry, qRT-PCR, real-time PCR, PCR, flow cytometry, electrophoresis, mass spectrometry, or combinations thereof while the exosomes may be isolated using immunohistochemical methods such as enzyme linked immunosorbent assay (ELISA) methods. Exosomes may also be isolated by size exclusion chromatography, density gradient centrifugation, differential centrifugation, nanomembrane ultrafiltration, immunoabsorbent capture, affinity purification, microfluidic separation, or combinations thereof.

[0182] These methods afford the investigator the ability to monitor, in real time, the level of nucleic acids remaining or delivered. This is possible because the nucleic acids of the present disclosure, in some embodiments, differ from the endogenous forms due to the structural or chemical modifications.

[0183] In some embodiments, the nucleic acid may be quantified using methods such as, but not limited to, ultraviolet visible spectroscopy (UV/Vis). A non-limiting example of a UV/Vis spectrometer is a NANODROP® spectrometer (ThermoFisher, Waltham, Mass.). The quantified nucleic acid may be analyzed in order to determine if the nucleic acid may be of proper size, check that no degradation of the nucleic acid has occurred. Degradation of the nucleic acid may be checked by methods such as, but not limited to, agarose gel electrophoresis, HPLC based purification methods such as, but not limited to, strong anion exchange HPLC, weak anion exchange HPLC, reverse phase HPLC (RP-HPLC), and hydrophobic interaction HPLC (HIC-HPLC), liquid chromatography-mass spectrometry (LCMS), capillary electrophoresis (CE) and capillary gel electrophoresis (CGE).

### Pharmaceutical Formulations

[0184] Provided herein are compositions (e.g., pharmaceutical compositions), methods, kits and reagents for prevention or treatment of EBV in humans and other mammals, for example. EBV RNA (e.g., mRNA) vaccines can be used as therapeutic or prophylactic agents. They may be used in medicine to prevent and/or treat infectious disease.

[0185] In some embodiments, an EBV vaccine containing RNA polynucleotides as described herein can be administered to a subject (e.g., a mammalian subject, such as a human subject), and the RNA polynucleotides are translated in vivo to produce an antigenic polypeptide (antigen).

[0186] An “effective amount” of an EBV vaccine is based, at least in part, on the target tissue, target cell type, means of administration, physical characteristics of the RNA (e.g., length, nucleotide composition, and/or extent of modified nucleosides), other components of the vaccine, and other determinants, such as age, body weight, height, sex and general health of the subject. Typically, an effective amount of an EBV vaccine provides an induced or boosted immune response as a function of antigen production in the cells of the subject. In some embodiments, an effective amount of the EBV RNA vaccine containing RNA polynucleotides having at least one chemical modifications are more efficient than a composition containing a corresponding unmodified polynucleotide encoding the same antigen or a peptide antigen. Increased antigen production may be demonstrated by increased cell transfection (the percentage of cells transfected with the RNA vaccine), increased protein translation and/or expression from the polynucleotide, decreased nucleic acid degradation (as demonstrated, for example, by increased duration of protein translation from a modified polynucleotide), or altered antigen specific immune response of the host cell.

[0187] The term “pharmaceutical composition” refers to the combination of an active agent with a carrier, inert or active, making the composition especially suitable for diagnostic or therapeutic use in vivo or ex vivo. A “pharmaceutically acceptable carrier,” after administered to or upon a subject, does not cause undesirable physiological effects. The carrier in the pharmaceutical composition must be “acceptable” also in the sense that it is compatible with the active ingredient and can be capable of stabilizing it. One or more solubilizing agents can be utilized as pharmaceutical carriers for delivery of an active agent. Examples of a pharmaceutically acceptable carrier include, but are not limited to, biocompatible vehicles, adjuvants, additives, and diluents to achieve a composition usable as a dosage form. Examples of other carriers include colloidal silicon oxide, magnesium stearate, cellulose, and sodium lauryl sulfate. Additional suitable pharmaceutical carriers and diluents, as well as pharmaceutical necessities for their use, are described in Remington's Pharmaceutical Sciences.

[0188] In some embodiments, RNA vaccines (including polynucleotides and their encoded polypeptides) in accordance with the present disclosure may be used for treatment or prevention of EBV. EBV RNA vaccines may be administered prophylactically or therapeutically as part of an active immunization scheme to healthy individuals or early in infection during the incubation phase or during active infection after onset of symptoms. In some embodiments, the amount of RNA vaccines of the present disclosure provided to a cell, a tissue or a subject may be an amount effective for immune prophylaxis.

[0189] EBV RNA (e.g., mRNA) vaccines may be administered with other prophylactic or therapeutic compounds. As a non-limiting example, a prophylactic or therapeutic compound may be an adjuvant or a booster. As used herein, when referring to a prophylactic composition, such as a vaccine, the term “booster” refers to an extra administration of the prophylactic (vaccine) composition. A booster (or booster vaccine) may be given after an earlier administration of the prophylactic composition. The time of administration between the initial administration of the prophylactic composition and the booster may be, but is not limited to, 1 minute, 2 minutes, 3 minutes, 4 minutes, 5 minutes, 6 minutes, 7 minutes, 8 minutes, 9 minutes, 10 minutes, 15 minutes, 20 minutes 35 minutes, 40 minutes, 45 minutes, 50 minutes, 55 minutes, 1 hour, 2 hours, 3 hours, 4 hours, 5 hours, 6 hours, 7 hours, 8 hours, 9 hours, 10 hours, 11 hours, 12 hours, 13 hours, 14 hours, 15 hours, 16 hours, 17 hours, 18 hours, 19 hours, 20 hours, 21 hours, 22 hours, 23 hours, 1 day, 36 hours, 2 days, 3 days, 4 days, 5 days, 6 days, 1 week, 10 days, 2 weeks, 3 weeks, 1 month, 2 months, 3 months, 4 months, 5 months, 6 months, 7 months, 8 months, 9 months, 10 months, 11 months, 1 year, 18 months, 2 years, 3 years, 4 years, 5 years, 6 years, 7 years, 8 years, 9 years, 10 years, 11 years, 12 years, 13 years, 14 years, 15 years, 16 years, 17 years, 18 years, 19 years, 20 years, 25 years, 30 years, 35 years, 40 years, 45 years, 50 years, 55 years, 60 years, 65 years, 70 years, 75 years, 80 years, 85 years, 90 years, 95 years or more than 99 years. In exemplary embodiments, the time of administration between the initial administration of the prophylactic composition and the booster may be, but is not limited to, 1 week, 2 weeks, 3 weeks, 1 month, 2 months, 3 months, 6 months or 1 year.

[0190] In some embodiments, EBV RNA vaccines may be administered intramuscularly, intranasally or intradermally, similarly to the administration of inactivated vaccines known in the art.

[0191] The EBV RNA vaccines may be utilized in various settings depending on the prevalence of the infection or the degree or level of unmet medical need. As a non-limiting example, the RNA vaccines may be utilized to treat and/or prevent a variety of infectious disease. RNA vaccines have superior properties in that they produce much larger antibody titers, better neutralizing immunity, produce more durable immune responses, and/or produce responses earlier than commercially available vaccines.

[0192] Provided herein are pharmaceutical compositions including EBV RNA vaccines and RNA vaccine compositions and/or complexes optionally in combination with one or more pharmaceutically acceptable excipients.

[0193] EBV RNA (e.g., mRNA) vaccines may be formulated or administered alone or in conjunction with one or more other components. For instance, EBV RNA vaccines (vaccine compositions) may comprise other components including, but not limited to, adjuvants.

[0194] In some embodiments, EBV RNA vaccines do not include an adjuvant (they are adjuvant free).

[0195] EBV RNA (e.g., mRNA) vaccines may be formulated or administered in combination with one or more pharmaceutically-acceptable excipients. In some embodiments, vaccine compositions comprise at least one additional active substances, such as, for example, a therapeutically-active substance, a prophylactically-active substance, or a combination of both. Vaccine compositions may be sterile, pyrogen-free or both sterile and pyrogen-free. General considerations in the formulation and/or manufacture of pharmaceutical agents, such as vaccine compositions, may be found, for example, in Remington: The Science and Practice of Pharmacy 21st ed., Lippincott Williams & Wilkins, 2005 (incorporated herein by reference in its entirety).

[0196] In some embodiments, EBV RNA vaccines are administered to humans, human patients or subjects. For the purposes of the present disclosure, the phrase “active ingredient” generally refers to the RNA vaccines or the polynucleotides contained therein, for example, RNA polynucleotides (e.g., mRNA polynucleotides) encoding antigens.

[0197] Formulations of the vaccine compositions described herein may be prepared by any method known or hereafter developed in the art of pharmacology. In general, such preparatory methods include the step of bringing the active ingredient (e.g., mRNA polynucleotide) into association with an excipient and/or one or more other accessory ingredients, and then, if necessary and/or desirable, dividing, shaping and/or packaging the product into a desired single- or multi-dose unit.

[0198] Relative amounts of the active ingredient, the pharmaceutically acceptable excipient, and/or any additional ingredients in a pharmaceutical composition in accordance with the disclosure will vary, depending upon the identity, size, and/or condition of the subject treated and further depending upon the route by which the composition is to be administered. By way of example, the composition may comprise between 0.1% and 100%, e.g., between 0.5 and 50%, between 1-30%, between 5-80%, at least 80% (w/w) active ingredient.

[0199] In some embodiments, EBV RNA vaccines are formulated using one or more excipients to: (1) increase stability; (2) increase cell transfection; (3) permit the sustained or delayed release (e.g., from a depot formulation); (4) alter the biodistribution (e.g., target to specific tissues or cell types); (5) increase the translation of encoded protein in vivo; and/or (6) alter the release profile of encoded protein (antigen) in vivo. In addition to traditional excipients such as any and all solvents, dispersion media, diluents, or other liquid vehicles, dispersion or suspension aids, surface active agents, isotonic agents, thickening or emulsifying agents, preservatives, excipients can include, without limitation, lipidoids, liposomes, lipid nanoparticles, polymers, lipoplexes, core-shell nanoparticles, peptides, proteins, cells transfected with EBV RNA vaccines (e.g., for transplantation into a subject), hyaluronidase, nanoparticle mimics and combinations thereof.

### Lipid Nanoparticles (LNPs)

[0200] In some embodiments, EBV RNA (e.g., mRNA) vaccines of the disclosure are formulated in a lipid nanoparticle (LNP). Lipid nanoparticles typically comprise ionizable cationic lipid, non-cationic lipid, sterol and PEG lipid components along with the nucleic acid cargo of interest. The lipid nanoparticles of the disclosure can be generated using components, compositions, and methods as are generally known in the art, see for example PCT/US2016/052352; PCT/US2016/068300; PCT/US2017/037551; PCT/US2015/027400; PCT/US2016/047406; PCT/US2016000129; PCT/US2016/014280; PCT/US2016/014280; PCT/US2017/038426; PCT/US2014/027077; PCT/US2014/055394; PCT/US2016/52117; PCT/US2012/069610; PCT/US2017/027492; PCT/US2016/059575 and PCT/US2016/069491 all of which are incorporated by reference herein in their entirety.

[0201] Vaccines of the present disclosure are typically formulated in lipid nanoparticle. In some embodiments, the lipid nanoparticle comprises at least one ionizable cationic lipid, at least one non-cationic lipid, at least one sterol, and/or at least one polyethylene glycol (PEG)-modified lipid.

[0202] In some embodiments, the lipid nanoparticle comprises a molar ratio of 20-60% ionizable cationic lipid. For example, the lipid nanoparticle may comprise a molar ratio of 20-50%, 20-40%, 20-30%, 30-60%, 30-50%, 30-40%, 40-60%, 40-50%, or 50-60% ionizable cationic lipid. In some embodiments, the lipid nanoparticle comprises a molar ratio of 20%, 30%, 40%, 50, or 60% ionizable cationic lipid.

[0203] In some embodiments, the lipid nanoparticle comprises a molar ratio of 5-25% non-cationic lipid. For example, the lipid nanoparticle may comprise a molar ratio of 5-20%, 5-15%, 5-10%, 10-25%, 10-20%, 10-25%, 15-25%, 15-20%, or 20-25% non-cationic lipid. In some embodiments, the lipid nanoparticle comprises a molar ratio of 5%, 10%, 15%, 20%, or25% non-cationic lipid.

[0204] In some embodiments, the lipid nanoparticle comprises a molar ratio of 25-55% sterol. For example, the lipid nanoparticle may comprise a molar ratio of 25-50%, 25-45%, 25-40%, 25-35%, 25-30%, 30-55%, 30-50%, 30-45%, 30-40%, 30-35%, 35-55%, 35-50%, 35-45%, 35-40%, 40-55%, 40-50%, 40-45%, 45-55%, 45-50%, or 50-55% sterol. In some embodiments, the lipid nanoparticle comprises a molar ratio of 25%, 30%, 35%, 40%, 45%, 50%, or 55% sterol.

[0205] In some embodiments, the lipid nanoparticle comprises a molar ratio of 0.5-15% PEG-modified lipid. For example, the lipid nanoparticle may comprise a molar ratio of 0.5-10%, 0.5-5%, 1-15%, 1-10%, 1-5%, 2-15%, 2-10%, 2-5%, 5-15%, 5-10%, or 10-15%. In some embodiments, the lipid nanoparticle comprises a molar ratio of 0.5%, 1%, 2%, 3%, 4%, 5%, 6%, 7%, 8%, 9%, 10%, 11%, 12%, 13%, 14%, or 15% PEG-modified lipid.

[0206] In some embodiments, the lipid nanoparticle comprises a molar ratio of 20-60% ionizable cationic lipid, 5-25% non-cationic lipid, 25-55% sterol, and 0.5-15% PEG-modified lipid.

[0207] In some embodiments, an ionizable cationic lipid of the disclosure comprises a compound of Formula (I):

[chemical structure]

[0208] or a salt or isomer thereof, wherein:

[0209] R₁ is selected from the group consisting of C₅₋₃₀ alkyl, C₅₋₂₀ alkenyl, —R*YR″, —YR″, and —R″M′R′;

[0210] R₂ and R₃ are independently selected from the group consisting of H, C₁₋₁₄ alkyl, C₂₋₁₄ alkenyl, —R*YR″, —YR″, and —R*OR″, or R₂ and R₃, together with the atom to which they are attached, form a heterocycle or carbocycle;

[0211] R₄ is selected from the group consisting of a C₃₋₆ carbocycle, —(CH₂)ₙQ, —(CH₂)ₙCHQR, —CHQR, —CQ(R)₂, and unsubstituted C₁₋₆ alkyl, where Q is selected from a carbocycle, heterocycle, —OR, —O(CH₂)ₙN(R)₂, —C(O)OR, —OC(O)R, —CX₃, —CX₂H, —CXH₂, —CN, —N(R)₂, —C(O)N(R)₂, —N(R)C(O)R, —N(R)S(O)₂R, —N(R)C(O)N(R)₂, —N(R)C(S)N(R)₂, —N(R)R₈, —O(CH₂)ₙOR, —N(R)C(═NR₉)N(R)₂, —N(R)C(═CHR₉)N(R)₂, —OC(O)N(R)₂, —N(R)C(O)OR, —N(OR)C(O)R, —N(OR)S(O)₂R, —N(OR)C(O)OR, —N(OR)C(O)N(R)₂, —N(OR)C(S)N(R)₂, —N(OR)C(═NR₉)N(R)₂, —N(OR)C(═CHR₉)N(R)₂, —C(═NR₉)N(R)₂, —C(═NR₉)R, —C(O)N(R)OR, and —C(R)N(R)₂C(O)OR, and each n is independently selected from 1, 2, 3, 4, and 5;

[0212] each R₅ is independently selected from the group consisting of C₁₋₃ alkyl, C₂₋₃ alkenyl, and H;

[0213] each R₆ is independently selected from the group consisting of C₁₋₃ alkyl, C₂₋₃ alkenyl, and H;

[0214] M and M′ are independently selected from —C(O)O—, —OC(O)—, —C(O)N(R′)—, —N(R′)C(O)—, —C(O)—, —C(S)—, —C(S)S—, —SC(S)—, —CH(OH)—, —P(O)(OR′)O—, —S(O)₂—, —S—S—, an aryl group, and a heteroaryl group;

[0215] R₇ is selected from the group consisting of C₁₋₃ alkyl, C₂₋₃ alkenyl, and H;

[0216] R₈ is selected from the group consisting of C₃₋₆ carbocycle and heterocycle;

[0217] R₉ is selected from the group consisting of H, CN, NO₂, C₁₋₆ alkyl, —OR, —S(O)₂R, —S(O)₂N(R)₂, C₂₋₆ alkenyl, C₃₋₆ carbocycle and heterocycle;

[0218] each R is independently selected from the group consisting of C₁₋₃ alkyl, C₂₋₃ alkenyl, and H;

[0219] each R′ is independently selected from the group consisting of C₁₋₁₈ alkyl, C₂₋₁₈ alkenyl, —R*YR″, —YR″, and H;

[0220] each R″ is independently selected from the group consisting of C₃₋₁₄ alkyl and C₃₋₁₄ alkenyl;

[0221] each R* is independently selected from the group consisting of C₁₋₁₂ alkyl and C₂₋₁₂ alkenyl;

[0222] each Y is independently a C₃₋₆ carbocycle;

[0223] each X is independently selected from the group consisting of F, Cl, Br, and I; and

[0224] m is selected from 5, 6, 7, 8, 9, 10, 11, 12, and 13.

[0225] In some embodiments, a subset of compounds of Formula (I) includes those in which when R₄ is —(CH₂)ₙQ, —(CH₂)ₙCHQR, —CHQR, or —CQ(R)₂, then (i) Q is not —N(R)₂ when n is 1, 2, 3, 4 or 5, or (ii) Q is not 5, 6, or 7-membered heterocycloalkyl when n is 1 or 2.

[0226] In some embodiments, another subset of compounds of Formula (I) includes those in which

[0227] R₁ is selected from the group consisting of C₅₋₃₀ alkyl, C₅₋₂₀ alkenyl, —R*YR″, —YR″, and —R″M′R′;

[0228] R₂ and R₃ are independently selected from the group consisting of H, C₁₋₁₄ alkyl, C₂₋₁₄ alkenyl, —R*YR″, —YR″, and —R*OR″, or R₂ and R₃, together with the atom to which they are attached, form a heterocycle or carbocycle;

[0229] R₄ is selected from the group consisting of a C₃₋₆ carbocycle, —(CH₂)ₙQ, —(CH₂)ₙCHQR, —CHQR, —CQ(R)₂, and unsubstituted C₁₋₆ alkyl, where Q is selected from a C₃₋₆ carbocycle, a 5- to 14-membered heteroaryl having one or more heteroatoms selected from N, O, and S, —OR, —(CH₂)ₙN(R)₂, —C(O)OR, —OC(O)R, —CX₃, —CX₂H, —CXH₂, —CN, —C(O)N(R)₂, —N(R)C(O)R, —N(R)S(O)₂R, —N(R)C(O)N(R)₂, —N(R)C(S)N(R)₂, —CRN(R)₂C(O)OR, —N(R)R₈, —O(CH₂)ₙOR, —N(R)C(═NR₉)N(R)₂, —N(R)C(═CHR₉)N(R)₂, —OC(O)N(R)₂, —N(R)C(O)OR, —N(OR)C(O)R, —N(OR)S(O)₂R, —N(OR)C(O)OR, —N(OR)C(O)N(R)₂, —N(OR)C(S)N(R)₂, —N(OR)C(═NR₉)N(R)₂, —N(OR)C(═CHR₉)N(R)₂, —C(═NR₉)N(R)₂, —C(═NR₉)R, —C(O)N(R)OR, and a 5- to 14-membered heterocycloalkyl having one or more heteroatoms selected from N, O, and S which is substituted with one or more substituents selected from oxo (═O), OH, amino, mono- or di-alkylamino, and C₁₋₃ alkyl, and each n is independently selected from 1, 2, 3, 4, and 5;

[0230] each R₅ is independently selected from the group consisting of C₁₋₃ alkyl, C₂₋₃ alkenyl, and H;

[0231] each R₆ is independently selected from the group consisting of C₁₋₃ alkyl, C₂₋₃ alkenyl, and H;

[0232] M and M′ are independently selected from —C(O)O—, —OC(O)—, —C(O)N(R′)—, —N(R′)C(O)—, —C(O)—, —C(S)—, —C(S)S—, —SC(S)—, —CH(OH)—, —P(O)(OR′)O—, —S(O)₂—, —S—S—, an aryl group, and a heteroaryl group;

[0233] R₇ is selected from the group consisting of C₁₋₃ alkyl, C₂₋₃ alkenyl, and H;

[0234] R₈ is selected from the group consisting of C₃₋₆ carbocycle and heterocycle;

[0235] R₉ is selected from the group consisting of H, CN, NO₂, C₁₋₆ alkyl, —OR, —S(O)₂R, —S(O)₂N(R)₂, C₂₋₆ alkenyl, C₃₋₆ carbocycle and heterocycle;

[0236] each R is independently selected from the group consisting of C₁₋₃ alkyl, C₂₋₃ alkenyl, and H;

[0237] each R′ is independently selected from the group consisting of C₁₋₁₈ alkyl, C₂₋₁₈ alkenyl, —R*YR″, —YR″, and H;

[0238] each R″ is independently selected from the group consisting of C₃₋₁₄ alkyl and C₃₋₁₄ alkenyl;

[0239] each R* is independently selected from the group consisting of C₁₋₁₂ alkyl and C₂₋₁₂ alkenyl;

[0240] each Y is independently a C₃₋₆ carbocycle;

[0241] each X is independently selected from the group consisting of F, Cl, Br, and I; and

[0242] m is selected from 5, 6, 7, 8, 9, 10, 11, 12, and 13,

[0243] or salts or isomers thereof.

[0244] In some embodiments, another subset of compounds of Formula (I) includes those in which

[0245] R₁ is selected from the group consisting of C₅₋₃₀ alkyl, C₅₋₂₀ alkenyl, —R*YR″, —YR″, and —R″M′R′;

[0246] R₂ and R₃ are independently selected from the group consisting of H, C₁₋₁₄ alkyl, C₂₋₁₄ alkenyl, —R*YR″, —YR″, and —R*OR″, or R₂ and R₃, together with the atom to which they are attached, form a heterocycle or carbocycle;

[0247] R₄ is selected from the group consisting of a C₃₋₆ carbocycle, —(CH₂)ₙQ, —(CH₂)ₙCHQR, —CHQR, —CQ(R)₂, and unsubstituted C₁₋₆ alkyl, where Q is selected from a C₃₋₆ carbocycle, a 5- to 14-membered heterocycle having one or more heteroatoms selected from N, O, and S, —OR, —O(CH₂)ₙN(R)₂, —C(O)OR, —OC(O)R, —CX₃, —CX₂H, —CXH₂, —CN, —C(O)N(R)₂, —N(R)C(O)R, —N(R)S(O)₂R, —N(R)C(O)N(R)₂, —N(R)C(S)N(R)₂, —CRN(R)₂C(O)OR, —N(R)R₈, —O(CH₂)ₙOR, —N(R)C(═NR₉)N(R)₂, —N(R)C(═CHR₉)N(R)₂, —OC(O)N(R)₂, —N(R)C(O)OR, —N(OR)C(O)R, —N(OR)S(O)₂R, —N(OR)C(O)OR, —N(OR)C(O)N(R)₂, —N(OR)C(S)N(R)₂, —N(OR)C(═NR₉)N(R)₂, —N(OR)C(═CHR₉)N(R)₂, —C(═NR₉)R, —C(O)N(R)OR, and —C(═NR₉)N(R)₂, and each n is independently selected from 1, 2, 3, 4, and 5; and when Q is a 5- to 14-membered heterocycle and (i) R₄ is —(CH₂)ₙQ in which n is 1 or 2, or (ii) R₄ is —(CH₂)ₙCHQR in which n is 1, or (iii) R₄ is —CHQR, and —CQ(R)₂, then Q is either a 5- to 14-membered heteroaryl or 8- to 14-membered heterocycloalkyl;

[0248] each R₅ is independently selected from the group consisting of C₁₋₃ alkyl, C₂₋₃ alkenyl, and H;

[0249] each R₆ is independently selected from the group consisting of C₁₋₃ alkyl, C₂₋₃ alkenyl, and H;

[0250] M and M′ are independently selected from —C(O)O—, —OC(O)—, —C(O)N(R′)—, —N(R′)C(O)—, —C(O)—, —C(S)—, —C(S)S—, —SC(S)—, —CH(OH)—, —P(O)(OR′)O—, —S(O)₂—, —S—S—, an aryl group, and a heteroaryl group;

[0251] R₇ is selected from the group consisting of C₁₋₃ alkyl, C₂₋₃ alkenyl, and H;

[0252] R₈ is selected from the group consisting of C₃₋₆ carbocycle and heterocycle;

[0253] R₉ is selected from the group consisting of H, CN, NO₂, C₁₋₆ alkyl, —OR, —S(O)₂R, —S(O)₂N(R)₂, C₂₋₆ alkenyl, C₃₋₆ carbocycle and heterocycle;

[0254] each R is independently selected from the group consisting of C₁₋₃ alkyl, C₂₋₃ alkenyl, and H;

[0255] each R′ is independently selected from the group consisting of C₁₋₁₈ alkyl, C₂₋₁₈ alkenyl, —R*YR″, —YR″, and H;

[0256] each R″ is independently selected from the group consisting of C₃₋₁₄ alkyl and C₃₋₁₄ alkenyl;

[0257] each R* is independently selected from the group consisting of C₁₋₁₂ alkyl and C₂₋₁₂ alkenyl;

[0258] each Y is independently a C₃₋₆ carbocycle;

[0259] each X is independently selected from the group consisting of F, Cl, Br, and I; and

[0260] m is selected from 5, 6, 7, 8, 9, 10, 11, 12, and 13,

[0261] or salts or isomers thereof.

[0262] In some embodiments, another subset of compounds of Formula (I) includes those in which

[0263] R₁ is selected from the group consisting of C₅₋₃₀ alkyl, C₅₋₂₀ alkenyl, —R*YR″, —YR″, and —R″M′R′;

[0264] R₂ and R₃ are independently selected from the group consisting of H, C₁₋₁₄ alkyl, C₂₋₁₄ alkenyl, —R*YR″, —YR″, and —R*OR″, or R₂ and R₃, together with the atom to which they are attached, form a heterocycle or carbocycle;

[0265] R₄ is selected from the group consisting of a C₃₋₆ carbocycle, —(CH₂)ₙQ, —(CH₂)ₙCHQR, —CHQR, —CQ(R)₂, and unsubstituted C₁₋₆ alkyl, where Q is selected from a C₃₋₆ carbocycle, a 5- to 14-membered heteroaryl having one or more heteroatoms selected from N, O, and S, —OR, —O(CH₂)ₙN(R)₂, —C(O)OR, —OC(O)R, —CX₃, —CX₂H, —CXH₂, —CN, —C(O)N(R)₂, —N(R)C(O)R, —N(R)S(O)₂R, —N(R)C(O)N(R)₂, —N(R)C(S)N(R)₂, —CRN(R)₂C(O)OR, —N(R)R₈, —O(CH₂)ₙOR, —N(R)C(═NR₉)N(R)₂, —N(R)C(═CHR₉)N(R)₂, —OC(O)N(R)₂, —N(R)C(O)OR, —N(OR)C(O)R, —N(OR)S(O)₂R, —N(OR)C(O)OR, —N(OR)C(O)N(R)₂, —N(OR)C(S)N(R)₂, —N(OR)C(═NR₉)N(R)₂, —N(OR)C(═CHR₉)N(R)₂, —C(═NR₉)R, —C(O)N(R)OR, and —C(═NR₉)N(R)₂, and each n is independently selected from 1, 2, 3, 4, and 5;

[0266] each R₅ is independently selected from the group consisting of C₁₋₃ alkyl, C₂₋₃ alkenyl, and H;

[0267] each R₆ is independently selected from the group consisting of C₁₋₃ alkyl, C₂₋₃ alkenyl, and H;

[0268] M and M′ are independently selected from —C(O)O—, —OC(O)—, —C(O)N(R′)—, —N(R′)C(O)—, —C(O)—, —C(S)—, —C(S)S—, —SC(S)—, —CH(OH)—, —P(O)(OR′)O—, —S(O)₂—, —S—S—, an aryl group, and a heteroaryl group;

[0269] R₇ is selected from the group consisting of C₁₋₃ alkyl, C₂₋₃ alkenyl, and H;

[0270] R₈ is selected from the group consisting of C₃₋₆ carbocycle and heterocycle;

[0271] R₉ is selected from the group consisting of H, CN, NO2, C₁₋₆ alkyl, —OR, —S(O)₂R, —S(O)₂N(R)₂, C₂₋₆ alkenyl, C₃₋₆ carbocycle and heterocycle;

[0272] each R is independently selected from the group consisting of C₁₋₃ alkyl, C₂₋₃ alkenyl, and H;

[0273] each R′ is independently selected from the group consisting of C₁₋₁₈ alkyl, C₂₋₁₈ alkenyl, —R*YR″, —YR″, and H;

[0274] each R″ is independently selected from the group consisting of C₃₋₁₄ alkyl and C₃₋₁₄ alkenyl;

[0275] each R* is independently selected from the group consisting of C₁₋₁₂ alkyl and C₂₋₁₂ alkenyl;

[0276] each Y is independently a C₃₋₆ carbocycle;

[0277] each X is independently selected from the group consisting of F, Cl, Br, and I; and

[0278] m is selected from 5, 6, 7, 8, 9, 10, 11, 12, and 13,

[0279] or salts or isomers thereof.

[0280] In some embodiments, another subset of compounds of Formula (I) includes those in which

[0281] R₁ is selected from the group consisting of C₅₋₃₀ alkyl, C₅₋₂₀ alkenyl, —R*YR″, —YR″, and —R″M′R′;

[0282] R₂ and R₃ are independently selected from the group consisting of H, C₂₋₁₄ alkyl, C₂₋₁₄ alkenyl, —R*YR″, —YR″, and —R*OR″, or R₂ and R₃, together with the atom to which they are attached, form a heterocycle or carbocycle;

[0283] R₄ is —(CH₂)ₙQ or —(CH₂)ₙCHQR, where Q is —N(R)₂, and n is selected from 3, 4, and 5;

[0284] each R₅ is independently selected from the group consisting of C₁₋₃ alkyl, C₂₋₃ alkenyl, and H;

[0285] each R₆ is independently selected from the group consisting of C₁₋₃ alkyl, C₂₋₃ alkenyl, and H;

[0286] M and M′ are independently selected from —C(O)O—, —OC(O)—, —C(O)N(R′)—, —N(R′)C(O)—, —C(O)—, —C(S)—, —C(S)S—, —SC(S)—, —CH(OH)—, —P(O)(OR′)O—, —S(O)₂—, —S—S—, an aryl group, and a heteroaryl group;

[0287] R₇ is selected from the group consisting of C₁₋₃ alkyl, C₂₋₃ alkenyl, and H;

[0288] each R is independently selected from the group consisting of C₁₋₃ alkyl, C₂₋₃ alkenyl, and H;

[0289] each R′ is independently selected from the group consisting of C₁₋₁₈ alkyl, C₂₋₁₈ alkenyl, —R*YR″, —YR″, and H;

[0290] each R″ is independently selected from the group consisting of C₃₋₁₄ alkyl and C₃₋₁₄ alkenyl;

[0291] each R* is independently selected from the group consisting of C₁₋₁₂ alkyl and C₁₋₁₂ alkenyl;

[0292] each Y is independently a C₃₋₆ carbocycle;

[0293] each X is independently selected from the group consisting of F, Cl, Br, and I; and

[0294] m is selected from 5, 6, 7, 8, 9, 10, 11, 12, and 13,

[0295] or salts or isomers thereof.

[0296] In some embodiments, another subset of compounds of Formula (I) includes those in which

[0297] R₁ is selected from the group consisting of C₅₋₃₀ alkyl, C₅₋₂₀ alkenyl, —R*YR″, —YR″, and —R″M′R′;

[0298] R₂ and R₃ are independently selected from the group consisting of C₁₋₁₄ alkyl, C₂₋₁₄ alkenyl, —R*YR″, —YR″, and —R*OR″, or R₂ and R₃, together with the atom to which they are attached, form a heterocycle or carbocycle;

[0299] R₄ is selected from the group consisting of —(CH₂)ₙQ, —(CH₂)ₙCHQR, —CHQR, and —CQ(R)₂, where Q is —N(R)₂, and n is selected from 1, 2, 3, 4, and 5;

[0300] each R₅ is independently selected from the group consisting of C₁₋₃ alkyl, C₂₋₃ alkenyl, and H;

[0301] each R₆ is independently selected from the group consisting of C₁₋₃ alkyl, C₂₋₃ alkenyl, and H;

[0302] M and M′ are independently selected from —C(O)O—, —OC(O)—, —C(O)N(R′)—, —N(R′)C(O)—, —C(O)—, —C(S)—, —C(S)S—, —SC(S)—, —CH(OH)—, —P(O)(OR′)O—, —S(O)₂—, —S—S—, an aryl group, and a heteroaryl group;

[0303] R₇ is selected from the group consisting of C₁₋₃ alkyl, C₂₋₃ alkenyl, and H;

[0304] each R is independently selected from the group consisting of C₁₋₃ alkyl, C₂₋₃ alkenyl, and H;

[0305] each R′ is independently selected from the group consisting of C₁₋₁₈ alkyl, C₂₋₁₈ alkenyl, —R*YR″, —YR″, and H;

[0306] each R″ is independently selected from the group consisting of C₃₋₁₄ alkyl and C₃₋₁₄ alkenyl;

[0307] each R* is independently selected from the group consisting of C₁₋₁₂ alkyl and C₁₋₁₂ alkenyl;

[0308] each Y is independently a C₃₋₆ carbocycle;

[0309] each X is independently selected from the group consisting of F, Cl, Br, and I; and

[0310] m is selected from 5, 6, 7, 8, 9, 10, 11, 12, and 13,

[0311] or salts or isomers thereof.

[0312] In some embodiments, a subset of compounds of Formula (I) includes those of Formula (IA):

[chemical structure]

[0313] or a salt or isomer thereof, wherein 1 is selected from 1, 2, 3, 4, and 5; m is selected from 5, 6, 7, 8, and 9; M₁ is a bond or M′; R₄ is unsubstituted C₁₋₃ alkyl, or —(CH₂)ₙQ, in which Q is OH, —NHC(S)N(R)₂, —NHC(O)N(R)₂, —N(R)C(O)R, —N(R)S(O)₂R, —N(R)R₈, —NHC(═NR₉)N(R)₂, —NHC(═CHR₉)N(R)₂, —OC(O)N(R)₂, —N(R)C(O)OR, heteroaryl or heterocycloalkyl; M and M′ are independently selected from —C(O)O—, —OC(O)—, —C(O)N(R′)—, —P(O)(OR′)O—, —S—S—, an aryl group, and a heteroaryl group; and R₂ and R₃ are independently selected from the group consisting of H, C₁₋₁₄ alkyl, and C₂₋₁₄ alkenyl.

[0314] In some embodiments, a subset of compounds of Formula (I) includes those of Formula (II):

[chemical structure]

or a salt or isomer thereof, wherein 1 is selected from 1, 2, 3, 4, and 5; M₁ is a bond or M′; R₄ is unsubstituted C₁₋₃ alkyl, or —(CH₂)ₙQ, in which n is 2, 3, or 4, and Q is OH, —NHC(S)N(R)₂, —NHC(O)N(R)₂, —N(R)C(O)R, —N(R)S(O)₂R, —N(R)R₈, —NHC(═NR₉)N(R)₂, —NHC(═CHR₉)N(R)₂, —OC(O)N(R)₂, —N(R)C(O)OR, heteroaryl or heterocycloalkyl; M and M′ are independently selected from —C(O)O—, —OC(O)—, —C(O)N(R′)—, —P(O)(OR′)O—, —S—S—, an aryl group, and a heteroaryl group; and R₂ and R₃ are independently selected from the group consisting of H, C₁₋₁₄ alkyl, and C₂₋₁₄ alkenyl.

[0315] In some embodiments, a subset of compounds of Formula (I) includes those of Formula (IIa), (IIb), (IIc), or (IIe):

[chemical structure]

[0316] or a salt or isomer thereof, wherein R₄ is as described herein.

[0317] In some embodiments, a subset of compounds of Formula (I) includes those of Formula (IId):

[chemical structure]

[0318] or a salt or isomer thereof, wherein n is 2, 3, or 4; and m, R′, R″, and R₂ through R₆ are as described herein. For example, each of R₂ and R₃ may be independently selected from the group consisting of C₅₋₁₄ alkyl and C₅₋₁₄ alkenyl.

[0319] In some embodiments, an ionizable cationic lipid of the disclosure comprises a compound having structure:

[chemical structure]

[0320] In some embodiments, an ionizable cationic lipid of the disclosure comprises a compound having structure:

[chemical structure]

[0321] In some embodiments, a non-cationic lipid of the disclosure comprises 1,2-distearoyl-sn-glycero-3-phosphocholine (DSPC), 1,2-dioleoyl-sn-glycero-3-phosphoethanolamine (DOPE), 1,2-dilinoleoyl-sn-glycero-3-phosphocholine (DLPC), 1,2-dimyristoyl-sn-gly cero-phosphocholine (DMPC), 1,2-dioleoyl-sn-glycero-3-phosphocholine (DOPC), 1,2-dipalmitoyl-sn-glycero-3-phosphocholine (DPPC), 1,2-diundecanoyl-sn-glycero-phosphocholine (DUPC), 1-palmitoyl-2-oleoyl-sn-glycero-3-phosphocholine (POPC), 1,2-di-O-octadecenyl-sn-glycero-3-phosphocholine (18:0 Diether PC), 1-oleoyl-2 cholesterylhemisuccinoyl-sn-glycero-3-phosphocholine (OChemsPC), 1-hexadecyl-sn-glycero-3-phosphocholine (C16 Lyso PC), 1,2-dilinolenoyl-sn-glycero-3-phosphocholine, 1,2-diarachidonoyl-sn-glycero-3-phosphocholine, 1,2-didocosahexaenoyl-sn-glycero-3-phosphocholine, 1,2-diphytanoyl-sn-glycero-3-phosphoethanolamine (ME 16.0 PE), 1,2-distearoyl-sn-glycero-3-phosphoethanolamine, 1,2-dilinoleoyl-sn-glycero-3-phosphoethanolamine, 1,2-dilinolenoyl-sn-glycero-3-phosphoethanolamine, 1,2-diarachidonoyl-sn-glycero-3-phosphoethanolamine, 1,2-didocosahexaenoyl-sn-glycero-3-phosphoethanolamine, 1,2-dioleoyl-sn-glycero-3-phospho-rac-(1-glycerol) sodium salt (DOPG), sphingomyelin, and mixtures thereof.

[0322] In some embodiments, a PEG modified lipid of the disclosure comprises a PEG-modified phosphatidylethanolamine, a PEG-modified phosphatidic acid, a PEG-modified ceramide, a PEG-modified dialkylamine, a PEG-modified diacylglycerol, a PEG-modified dialkylglycerol, and mixtures thereof. In some embodiments, the PEG-modified lipid is PEG-DMG, PEG-c-DOMG (also referred to as PEG-DOMG), PEG-DSG and/or PEG-DPG.

[0323] In some embodiments, a sterol of the disclosure comprises cholesterol, fecosterol, sitosterol, ergosterol, campesterol, stigmasterol, brassicasterol, tomatidine, ursolic acid, alpha-tocopherol, and mixtures thereof.

[0324] In some embodiments, a LNP of the disclosure comprises an ionizable cationic lipid of Compound 1, wherein the non-cationic lipid is DSPC, the structural lipid that is cholesterol, and the PEG lipid is PEG-DMG.

[0325] In some embodiments, a LNP of the disclosure comprises an N:P ratio of from about 2:1 to about 30:1.

[0326] In some embodiments, a LNP of the disclosure comprises an N:P ratio of about 6:1.

[0327] In some embodiments, a LNP of the disclosure comprises an N:P ratio of about 3:1.

[0328] In some embodiments, a LNP of the disclosure comprises a wt/wt ratio of the ionizable cationic lipid component to the RNA of from about 10:1 to about 100:1.

[0329] In some embodiments, a LNP of the disclosure comprises a wt/wt ratio of the ionizable cationic lipid component to the RNA of about 20:1.

[0330] In some embodiments, a LNP of the disclosure comprises a wt/wt ratio of the ionizable cationic lipid component to the RNA of about 10:1.

[0331] In some embodiments, a LNP of the disclosure has a mean diameter from about 50 nm to about 150 nm.

[0332] In some embodiments, a LNP of the disclosure has a mean diameter from about 70 nm to about 120 nm.

### Multivalent Vaccines

[0333] The EBV vaccines, as provided herein, may include an RNA (e.g. mRNA) or multiple RNAs encoding two or more antigens of the same or different EBV species. In some embodiments, an EBV vaccine includes an RNA or multiple RNAs encoding two or more antigens selected from gp350, gH, gL, gB, gp42, LMP1, LMP2, EBNA1 and EBNA3 antigens. In some embodiments, the RNA (at least one RNA) of an EBV vaccine may encode 1, 2, 3, 4, 5, 6, 7, 8, 9, 10, 11, 12, or more antigens.

[0334] In some embodiments, an EBV vaccine comprises at least one RNA encoding a gp350 antigen and a gH antigen. In some embodiments, an EBV vaccine comprises at least one RNA encoding a gp350 antigen and a gL antigen. In some embodiments, an EBV vaccine comprises at least one RNA encoding a gp350 antigen and a gB antigen. In some embodiments, an EBV vaccine comprises at least one RNA encoding a gp350 antigen and a gp42 antigen. In some embodiments, an EBV vaccine comprises at least one RNA encoding a gp350 antigen and a LMP (e.g., LMP1 and/or LMP2) antigen. In some embodiments, an EBV vaccine comprises at least one RNA encoding a gp350 antigen and an EBNA (e.g., EBNA1 and/or EBNA3) antigen.

[0335] In some embodiments, an EBV vaccine comprises at least one RNA encoding a gp350 antigen, gH antigen and a gL antigen. In some embodiments, an EBV vaccine comprises at least one RNA encoding a gp350 antigen, gH antigen and a gB antigen. In some embodiments, an EBV vaccine comprises at least one RNA encoding a gp350 antigen, gH antigen and a gp42 antigen. In some embodiments, an EBV vaccine comprises at least one RNA encoding a gp350 antigen, gH antigen and a LMP (e.g., LMP1 and/or LMP2) antigen. In some embodiments, an EBV vaccine comprises at least one RNA encoding a gp350 antigen, gH antigen and an EBNA (e.g., EBNA1 and/or EBNA3) antigen.

[0336] In some embodiments, an EBV vaccine comprises at least one RNA encoding a gp350 antigen, gL antigen and a gB antigen. In some embodiments, an EBV vaccine comprises at least one RNA encoding a gp350 antigen, gL antigen and a gp42 antigen. In some embodiments, an EBV vaccine comprises at least one RNA encoding a gp350 antigen, gL antigen and a LMP (e.g., LMP1 and/or LMP2) antigen. In some embodiments, an EBV vaccine comprises at least one RNA encoding a gp350 antigen, gL antigen and an EBNA (e.g., EBNA1 and/or EBNA3) antigen.

[0337] In some embodiments, an EBV vaccine comprises at least one RNA encoding a gp350 antigen, gB antigen and a gp42 antigen. In some embodiments, an EBV vaccine comprises at least one RNA encoding a gp350 antigen, gB antigen and a LMP (e.g., LMP1 and/or LMP2) antigen. In some embodiments, an EBV vaccine comprises at least one RNA encoding a gp350 antigen, gB antigen and an EBNA (e.g., EBNA1 and/or EBNA3) antigen.

[0338] In some embodiments, an EBV vaccine comprises at least one RNA encoding a gp350 antigen, gp42 antigen and a LMP (e.g., LMP1 and/or LMP2) antigen. In some embodiments, an EBV vaccine comprises at least one RNA encoding a gp350 antigen, gp42 antigen and an EBNA (e.g., EBNA1 and/or EBNA3) antigen.

[0339] In some embodiments, an EBV vaccine comprises at least one RNA encoding a gp350 antigen, a LMP (e.g., LMP1 and/or LMP2) antigen, and an EBNA (e.g., EBNA1 and/or EBNA3) antigen.

[0340] In some embodiments, an EBV vaccine comprises at least one RNA encoding a gH antigen and a gL antigen. In some embodiments, an EBV vaccine comprises at least one RNA encoding a gH antigen and a gB antigen. In some embodiments, an EBV vaccine comprises at least one RNA encoding a gH antigen and a gp42 antigen. In some embodiments, an EBV vaccine comprises at least one RNA encoding a gH antigen and a LMP (e.g., LMP1 and/or LMP2) antigen. In some embodiments, an EBV vaccine comprises at least one RNA encoding a gH antigen and an EBNA (e.g., EBNA1 and/or EBNA3) antigen.

[0341] In some embodiments, an EBV vaccine comprises at least one RNA encoding a gL antigen and a gB antigen. In some embodiments, an EBV vaccine comprises at least one RNA encoding a gL antigen and a gp42 antigen. In some embodiments, an EBV vaccine comprises at least one RNA encoding a gL antigen and a LMP (e.g., LMP1 and/or LMP2) antigen. In some embodiments, an EBV vaccine comprises at least one RNA encoding a gL antigen and an EBNA (e.g., EBNA1 and/or EBNA3) antigen.

[0342] In some embodiments, an EBV vaccine comprises at least one RNA encoding a gB antigen and a gp42 antigen. In some embodiments, an EBV vaccine comprises at least one RNA encoding a gB antigen and a LMP (e.g., LMP1 and/or LMP2) antigen. In some embodiments, an EBV vaccine comprises at least one RNA encoding a gB antigen and an EBNA (e.g., EBNA1 and/or EBNA3) antigen.

[0343] In some embodiments, an EBV vaccine comprises at least one RNA encoding a gp42 antigen and a LMP (e.g., LMP1 and/or LMP2) antigen. In some embodiments, an EBV vaccine comprises at least one RNA encoding a gp42 antigen and an EBNA (e.g., EBNA1 and/or EBNA3) antigen.

[0344] In some embodiments, an EBV vaccine comprises at least one RNA encoding a LMP (e.g., LMP1 and/or LMP2) antigen and an EBNA (e.g., EBNA1 and/or EBNA3) antigen.

[0345] In some embodiments, two or more different RNA (e.g., mRNA) encoding antigens may be formulated in the same lipid nanoparticle. In other embodiments, two or more different RNA encoding antigens may be formulated in separate lipid nanoparticles (each RNA formulated in a single lipid nanoparticle). The lipid nanoparticles may then be combined and administered as a single vaccine composition (e.g., comprising multiple RNA encoding multiple antigens) or may be administered separately.

### Combination Vaccines

[0346] The EBV vaccines, as provided herein, may include an RNA or multiple RNAs encoding two or more antigens of the same or different EBV strains. Also provided herein are combination vaccines that include RNA encoding one or more EBV antigen(s) and one or more antigen(s) of a different organisms (e.g., bacterial and/or viral organism). Thus, the vaccines of the present disclosure may be combination vaccines that target one or more antigens of the same strain/species, or one or more antigens of different strains/species, e.g., antigens which induce immunity to organisms which are found in the same geographic areas where the risk of EBV infection is high or organisms to which an individual is likely to be exposed to when exposed to EBV.

### Dosing/Administration

[0347] Provided herein are compositions (e.g., pharmaceutical compositions), methods, kits and reagents for prevention and/or treatment of EBV in humans and other mammals. EBV RNA vaccines can be used as therapeutic or prophylactic agents. In some aspects, the RNA vaccines of the disclosure are used to provide prophylactic protection from EBV. In some aspects, the RNA vaccines of the disclosure are used to treat an EBV infection. In some embodiments, the EBV vaccines of the present disclosure are used in the priming of immune effector cells, for example, to activate peripheral blood mononuclear cells (PBMCs) ex vivo, which are then infused (re-infused) into a subject.

[0348] A subject may be any mammal, including non-human primate and human subjects. Typically, a subject is a human subject.

[0349] In some embodiments, the EBV vaccines are administered to a subject (e.g., a mammalian subject, such as a human subject) in an effective amount to induce an antigen-specific immune response. The RNA encoding the EBV antigen is expressed and translated in vivo to produce the antigen, which then stimulates an immune response in the subject.

[0350] Prophylactic protection from EBV can be achieved following administration of an EBV RNA vaccine of the present disclosure. Vaccines can be administered once, twice, three times, four times or more but it is likely sufficient to administer the vaccine once (optionally followed by a single booster). It is possible, although less desirable, to administer the vaccine to an infected individual to achieve a therapeutic response. Dosing may need to be adjusted accordingly.

[0351] A method of eliciting an immune response in a subject against EBV is provided in aspects of the present disclosure. The method involves administering to the subject an EBV RNA vaccine comprising at least one RNA (e.g., mRNA) having an open reading frame encoding at least one EBV antigen, thereby inducing in the subject an immune response specific to EBV antigen, wherein anti-antigen antibody titer in the subject is increased following vaccination relative to anti-antigen antibody titer in a subject vaccinated with a prophylactically effective dose of a traditional vaccine against the EBV. An “anti-antigen antibody” is a serum antibody the binds specifically to the antigen.

[0352] A prophylactically effective dose is an effective dose that prevents infection with the virus at a clinically acceptable level. In some embodiments, the effective dose is a dose listed in a package insert for the vaccine. A traditional vaccine, as used herein, refers to a vaccine other than the mRNA vaccines of the present disclosure. For instance, a traditional vaccine includes, but is not limited, to live microorganism vaccines, killed microorganism vaccines, subunit vaccines, protein antigen vaccines, DNA vaccines, virus like particle (VLP) vaccines, etc. In exemplary embodiments, a traditional vaccine is a vaccine that has achieved regulatory approval and/or is registered by a national drug regulatory body, for example the Food and Drug Administration (FDA) in the United States or the European Medicines Agency (EMA).

[0353] In some embodiments, the anti-antigen antibody titer in the subject is increased 1 log to 10 log following vaccination relative to anti-antigen antibody titer in a subject vaccinated with a prophylactically effective dose of a traditional vaccine against the EBV or an unvaccinated subject. In some embodiments, the anti-antigen antibody titer in the subject is increased 1 log, 2 log, 3 log, 4 log, 5 log, or 10 log following vaccination relative to anti-antigen antibody titer in a subject vaccinated with a prophylactically effective dose of a traditional vaccine against the EBV or an unvaccinated subject.

[0354] A method of eliciting an immune response in a subject against an EBV is provided in other aspects of the disclosure. The method involves administering to the subject an EBV RNA vaccine comprising at least one RNA polynucleotide having an open reading frame encoding at least one EBV antigen, thereby inducing in the subject an immune response specific to EBV antigen, wherein the immune response in the subject is equivalent to an immune response in a subject vaccinated with a traditional vaccine against the EBV at 2 times to 100 times the dosage level relative to the RNA vaccine.

[0355] In some embodiments, the immune response in the subject is equivalent to an immune response in a subject vaccinated with a traditional vaccine at twice the dosage level relative to the EBV RNA vaccine. In some embodiments, the immune response in the subject is equivalent to an immune response in a subject vaccinated with a traditional vaccine at three times the dosage level relative to the EBV RNA vaccine. In some embodiments, the immune response in the subject is equivalent to an immune response in a subject vaccinated with a traditional vaccine at 4 times, 5 times, 10 times, 50 times, or 100 times the dosage level relative to the EBV RNA vaccine. In some embodiments, the immune response in the subject is equivalent to an immune response in a subject vaccinated with a traditional vaccine at 10 times to 1000 times the dosage level relative to the EBV RNA vaccine. In some embodiments, the immune response in the subject is equivalent to an immune response in a subject vaccinated with a traditional vaccine at 100 times to 1000 times the dosage level relative to the EBV RNA vaccine.

[0356] In other embodiments, the immune response is assessed by determining [protein] antibody titer in the subject. In other embodiments, the ability of serum or antibody from an immunized subject is tested for its ability to neutralize viral uptake or reduce EBV transformation of human B lymphocytes. In other embodiments, the ability to promote a robust T cell response(s) is measured using art recognized techniques.

[0357] Other aspects the disclosure provide methods of eliciting an immune response in a subject against an EBV by administering to the subject an EBV RNA vaccine comprising at least one RNA polynucleotide having an open reading frame encoding at least one EBV antigen, thereby inducing in the subject an immune response specific to EBV antigen, wherein the immune response in the subject is induced 2 days to 10 weeks earlier relative to an immune response induced in a subject vaccinated with a prophylactically effective dose of a traditional vaccine against the EBV. In some embodiments, the immune response in the subject is induced in a subject vaccinated with a prophylactically effective dose of a traditional vaccine at 2 times to 100 times the dosage level relative to the RNA vaccine.

[0358] In some embodiments, the immune response in the subject is induced 2 days, 3 days, 1 week, 2 weeks, 3 weeks, 5 weeks, or 10 weeks earlier relative to an immune response induced in a subject vaccinated with a prophylactically effective dose of a traditional vaccine.

[0359] Also provided herein are methods of eliciting an immune response in a subject against an EBV by administering to the subject an EBV RNA vaccine having an open reading frame encoding a first antigen, wherein the RNA polynucleotide does not include a stabilization element, and wherein an adjuvant is not co-formulated or co-administered with the vaccine.

[0360] EBV RNA (e.g., mRNA) vaccines may be administered by any route which results in a therapeutically effective outcome. These include, but are not limited, to intradermal, intramuscular, intranasal, and/or subcutaneous administration. The present disclosure provides methods comprising administering RNA vaccines to a subject in need thereof. The exact amount required will vary from subject to subject, depending on the species, age, and general condition of the subject, the severity of the disease, the particular composition, its mode of administration, its mode of activity, and the like. EBV RNA (e.g., mRNA) vaccines compositions are typically formulated in dosage unit form for ease of administration and uniformity of dosage. It will be understood, however, that the total daily usage of EBV RNA (e.g., mRNA)vaccines compositions may be decided by the attending physician within the scope of sound medical judgment. The specific therapeutically effective, prophylactically effective, or appropriate imaging dose level for any particular patient will depend upon a variety of factors including the disorder being treated and the severity of the disorder; the activity of the specific compound employed; the specific composition employed; the age, body weight, general health, sex and diet of the patient; the time of administration, route of administration, and rate of excretion of the specific compound employed; the duration of the treatment; drugs used in combination or coincidental with the specific compound employed; and like factors well known in the medical arts.

[0361] The effective amount of an EBV vaccine, as provided herein, may be as low as 20 μg, administered for example as a single dose or as two 10 μg doses. In some embodiments, the effective amount is a total dose of 20 μg-200 μg. For example, the effective amount may be a total dose of 20 μg, 25 μg, 30 μg, 35 μg, 40 μg, 45 μg, 50 μg, 55 μg, 60 μg, 65 μg, 70 μg, 75 μg, 80 μg, 85 μg, 90 μg, 95 μg, 100 μg, 110 μg, 120 μg, 130 μg, 140 μg, 150 μg, 160 μg, 170 μg, 180 μg, 190 μg or 200 μg. In some embodiments, the effective amount is a total dose of 25 μg-200 μg. In some embodiments, the effective amount is a total dose of 50 μg-200 μg.

[0362] In some embodiments, EBV RNA (e.g., mRNA) vaccines compositions may be administered at dosage levels sufficient to deliver 0.0001 mg/kg to 100 mg/kg, 0.001 mg/kg to 0.05 mg/kg, 0.005 mg/kg to 0.05 mg/kg, 0.001 mg/kg to 0.005 mg/kg, 0.05 mg/kg to 0.5 mg/kg, 0.01 mg/kg to 50 mg/kg, 0.1 mg/kg to 40 mg/kg, 0.5 mg/kg to 30 mg/kg, 0.01 mg/kg to 10 mg/kg, 0.1 mg/kg to 10 mg/kg, or 1 mg/kg to 25 mg/kg, of subject body weight per day, one or more times a day, per week, per month, etc. to obtain the desired therapeutic, diagnostic, prophylactic, or imaging effect (see e.g., the range of unit doses described in International Publication No. WO2013078199, herein incorporated by reference in its entirety). The desired dosage may be delivered three times a day, two times a day, once a day, every other day, every third day, every week, every two weeks, every three weeks, every four weeks, every 2 months, every three months, every 6 months, etc. In certain embodiments, the desired dosage may be delivered using multiple administrations (e.g., two, three, four, five, six, seven, eight, nine, ten, eleven, twelve, thirteen, fourteen, or more administrations). When multiple administrations are employed, split dosing regimens such as those described herein may be used. In exemplary embodiments, EBV RNA (e.g., mRNA) vaccines compositions may be administered at dosage levels sufficient to deliver 0.0005 mg/kg to 0.01 mg/kg, e.g., about 0.0005 mg/kg to about 0.0075 mg/kg, e.g., about 0.0005 mg/kg, about 0.001 mg/kg, about 0.002 mg/kg, about 0.003 mg/kg, about 0.004 mg/kg or about 0.005 mg/kg.

[0363] In some embodiments, EBV RNA (e.g., mRNA) vaccine compositions may be administered once or twice (or more) at dosage levels sufficient to deliver 0.025 mg/kg to 0.250 mg/kg, 0.025 mg/kg to 0.500 mg/kg, 0.025 mg/kg to 0.750 mg/kg, or 0.025 mg/kg to 1.0 mg/kg.

[0364] In some embodiments, EBV RNA (e.g., mRNA) vaccine compositions may be administered twice (e.g., Day 0 and Day 7, Day 0 and Day 14, Day 0 and Day 21, Day 0 and Day 28, Day 0 and Day 60, Day 0 and Day 90, Day 0 and Day 120, Day 0 and Day 150, Day 0 and Day 180, Day 0 and 3 months later, Day 0 and 6 months later, Day 0 and 9 months later, Day 0 and 12 months later, Day 0 and 18 months later, Day 0 and 2 years later, Day 0 and 5 years later, or Day 0 and 10 years later) at a total dose of or at dosage levels sufficient to deliver a total dose of 0.0100 mg, 0.025 mg, 0.050 mg, 0.075 mg, 0.100 mg, 0.125 mg, 0.150 mg, 0.175 mg, 0.200 mg, 0.225 mg, 0.250 mg, 0.275 mg, 0.300 mg, 0.325 mg, 0.350 mg, 0.375 mg, 0.400 mg, 0.425 mg, 0.450 mg, 0.475 mg, 0.500 mg, 0.525 mg, 0.550 mg, 0.575 mg, 0.600 mg, 0.625 mg, 0.650 mg, 0.675 mg, 0.700 mg, 0.725 mg, 0.750 mg, 0.775 mg, 0.800 mg, 0.825 mg, 0.850 mg, 0.875 mg, 0.900 mg, 0.925 mg, 0.950 mg, 0.975 mg, or 1.0 mg. Higher and lower dosages and frequency of administration are encompassed by the present disclosure. For example, an EBV RNA (e.g., mRNA) vaccine composition may be administered three or four times.

[0365] In some embodiments, EBV RNA (e.g., mRNA) vaccine compositions may be administered twice (e.g., Day 0 and Day 7, Day 0 and Day 14, Day 0 and Day 21, Day 0 and Day 28, Day 0 and Day 60, Day 0 and Day 90, Day 0 and Day 120, Day 0 and Day 150, Day 0 and Day 180, Day 0 and 3 months later, Day 0 and 6 months later, Day 0 and 9 months later, Day 0 and 12 months later, Day 0 and 18 months later, Day 0 and 2 years later, Day 0 and 5 years later, or Day 0 and 10 years later) at a total dose of or at dosage levels sufficient to deliver a total dose of 0.010 mg, 0.025 mg, 0.100 mg or 0.400 mg.

[0366] In some embodiments, the EBV RNA (e.g., mRNA) vaccine for use in a method of vaccinating a subject is administered the subject a single dosage of between 10 μg/kg and 400 μg/kg of the nucleic acid vaccine in an effective amount to vaccinate the subject. In some embodiments, the RNA vaccine for use in a method of vaccinating a subject is administered the subject a single dosage of between 10 μg and 400 μg of the nucleic acid vaccine in an effective amount to vaccinate the subject. In some embodiments, an EBV RNA (e.g., mRNA) vaccine for use in a method of vaccinating a subject is administered to the subject as a single dosage of 25-1000 μg (e.g., a single dosage of mRNA encoding an EBV antigen). In some embodiments, an EBV RNA vaccine is administered to the subject as a single dosage of 25, 50, 100, 150, 200, 250, 300, 350, 400, 450, 500, 550, 600, 650, 700, 750, 800, 850, 900, 950 or 1000 μg. For example, an EBV RNA vaccine may be administered to a subject as a single dose of 25-100, 25-500, 50-100, 50-500, 50-1000, 100-500, 100-1000, 250-500, 250-1000, or 500-1000 μg. In some embodiments, an EBV RNA (e.g., mRNA) vaccine for use in a method of vaccinating a subject is administered to the subject as two dosages, the combination of which equals 25-1000 μg of the EBV RNA (e.g., mRNA) vaccine.

[0367] AN EBV RNA (e.g., mRNA) vaccine pharmaceutical composition described herein can be formulated into a dosage form described herein, such as an intranasal, intratracheal, or injectable (e.g., intravenous, intraocular, intravitreal, intramuscular, intradermal, intracardiac, intraperitoneal, and subcutaneous).

### Vaccine Efficacy

[0368] Some aspects of the present disclosure provide formulations of the EBV RNA (e.g., mRNA) vaccine, wherein the EBV RNA vaccine is formulated in an effective amount to produce an antigen specific immune response in a subject (e.g., production of antibodies specific to an anti-EBV antigen). “An effective amount” is a dose of an EBV RNA (e.g., mRNA) vaccine effective to produce an antigen-specific immune response. Also provided herein are methods of inducing an antigen-specific immune response in a subject.

[0369] As used herein, an immune response to a vaccine or LNP of the present invention is the development in a subject of a humoral and/or a cellular immune response to a (one or more) EBV protein(s) present in the vaccine. For purposes of the present invention, a “humoral” immune response refers to an immune response mediated by antibody molecules, including, e.g., secretory (IgA) or IgG molecules, while a “cellular” immune response is one mediated by T-lymphocytes (e.g., CD4+ helper and/or CD8+ T cells (e.g., CTLs) and/or other white blood cells. One important aspect of cellular immunity involves an antigen-specific response by cytolytic T-cells (CTLs). CTLs have specificity for peptide antigens that are presented in association with proteins encoded by the major histocompatibility complex (MHC) and expressed on the surfaces of cells. CTLs help induce and promote the destruction of intracellular microbes or the lysis of cells infected with such microbes. Another aspect of cellular immunity involves and antigen-specific response by helper T-cells. Helper T-cells act to help stimulate the function, and focus the activity nonspecific effector cells against cells displaying peptide antigens in association with MHC molecules on their surface. A cellular immune response also leads to the production of cytokines, chemokines, and other such molecules produced by activated T-cells and/or other white blood cells including those derived from CD4+ and CD8+ T-cells.

[0370] In some embodiments, the antigen-specific immune response is characterized by measuring an anti-EBV antigen antibody titer produced in a subject administered an EBV RNA (e.g., mRNA) vaccine as provided herein. An antibody titer is a measurement of the amount of antibodies within a subject, for example, antibodies that are specific to a particular antigen (e.g., an anti-EBV antigen) or epitope of an antigen. Antibody titer is typically expressed as the inverse of the greatest dilution that provides a positive result. Enzyme-linked immunosorbent assay (ELISA) is a common assay for determining antibody titers, for example.

[0371] In some embodiments, an antibody titer is used to assess whether a subject has had an infection or to determine whether immunizations are required. In some embodiments, an antibody titer is used to determine the strength of an autoimmune response, to determine whether a booster immunization is needed, to determine whether a previous vaccine was effective, and to identify any recent or prior infections. In accordance with the present disclosure, an antibody titer may be used to determine the strength of an immune response induced in a subject by the EBV RNA (e.g., mRNA) vaccine.

[0372] In some embodiments, an anti-EBV antigen antibody titer produced in a subject is increased by at least 1 log relative to a control. For example, anti-EBV antigen antibody titer produced in a subject may be increased by at least 1.5, at least 2, at least 2.5, or at least 3 log relative to a control. In some embodiments, the anti-EBV antigen antibody titer produced in the subject is increased by 1, 1.5, 2, 2.5 or 3 log relative to a control. In some embodiments, the anti-EBV antigen antibody titer produced in the subject is increased by 1-3 log relative to a control. For example, the anti-EBV antigen antibody titer produced in a subject may be increased by 1-1.5, 1-2, 1-2.5, 1-3, 1.5-2, 1.5-2.5, 1.5-3, 2-2.5, 2-3, or 2.5-3 log relative to a control.

[0373] In some embodiments, the anti-EBV antigen antibody titer produced in a subject is increased at least 2 times relative to a control. For example, the anti-EBV antigen antibody titer produced in a subject may be increased at least 3 times, at least 4 times, at least 5 times, at least 6 times, at least 7 times, at least 8 times, at least 9 times, or at least 10 times relative to a control. In some embodiments, the anti-EBV antigen antibody titer produced in the subject is increased 2, 3, 4, 5, 6, 7, 8, 9, or 10 times relative to a control. In some embodiments, the anti-EBV antigen antibody titer produced in a subject is increased 2-10 times relative to a control. For example, the anti-EBV antigen antibody titer produced in a subject may be increased 2-10, 2-9, 2-8, 2-7, 2-6, 2-5, 2-4, 2-3, 3-10, 3-9, 3-8, 3-7, 3-6, 3-5, 3-4, 4-10, 4-9, 4-8, 4-7, 4-6, 4-5, 5-10, 5-9, 5-8, 5-7, 5-6, 6-10, 6-9, 6-8, 6-7, 7-10, 7-9, 7-8, 8-10, 8-9, or 9-10 times relative to a control.

[0374] A control, in some embodiments, is the anti-EBV antigen antibody titer produced in a subject who has not been administered an EBV RNA (e.g., mRNA) vaccine. In some embodiments, a control is an anti-EBV antigen antibody titer produced in a subject administered a recombinant or purified EBV protein vaccine. Recombinant protein vaccines typically include protein antigens that either have been produced in a heterologous expression system (e.g., bacteria or yeast) or purified from large amounts of the pathogenic organism.

[0375] In some embodiments, the ability of an EBV vaccine to be effective is measured in a murine model. For example, the EBV vaccines may be administered to a murine model and the murine model assayed for induction of neutralizing antibody titers. Viral challenge studies may also be used to assess the efficacy of a vaccine of the present disclosure. For example, the EBV vaccines may be administered to a murine model, the murine model challenged with EBV, and the murine model assayed for survival and/or immune response (e.g., neutralizing antibody response, T cell response (e.g., cytokine response)).

[0376] In some embodiments, an effective amount of an EBV RNA (e.g., mRNA) vaccine is a dose that is reduced compared to the standard of care dose of a recombinant EBV protein vaccine. A “standard of care,” as provided herein, refers to a medical or psychological treatment guideline and can be general or specific. “Standard of care” specifies appropriate treatment based on scientific evidence and collaboration between medical professionals involved in the treatment of a given condition. It is the diagnostic and treatment process that a physician/clinician should follow for a certain type of patient, illness or clinical circumstance. A “standard of care dose,” as provided herein, refers to the dose of a recombinant or purified EBV protein vaccine, or a live attenuated or inactivated EBV vaccine, or an EBV VLP vaccine, that a physician/clinician or other medical professional would administer to a subject to treat or prevent EBV, or an EBV-related condition, while following the standard of care guideline for treating or preventing EBV, or an EBV-related condition.

[0377] In some embodiments, the anti-EBV antigen antibody titer produced in a subject administered an effective amount of an EBV RNA vaccine is equivalent to an anti-EBV antigen antibody titer produced in a control subject administered a standard of care dose of a recombinant or purified EBV protein vaccine, or a live attenuated or inactivated EBV vaccine, or an EBV VLP vaccine.

[0378] In some embodiments, an effective amount of an EBV RNA (e.g., mRNA) vaccine is a dose equivalent to an at least 2-fold reduction in a standard of care dose of a recombinant or purified EBV protein vaccine. For example, an effective amount of an EBV RNA vaccine may be a dose equivalent to an at least 3-fold, at least 4-fold, at least 5-fold, at least 6-fold, at least 7-fold, at least 8-fold, at least 9-fold, or at least 10-fold reduction in a standard of care dose of a recombinant or purified EBV protein vaccine. In some embodiments, an effective amount of an EBV RNA vaccine is a dose equivalent to an at least at least 100-fold, at least 500-fold, or at least 1000-fold reduction in a standard of care dose of a recombinant or purified EBV protein vaccine. In some embodiments, an effective amount of an EBV RNA vaccine is a dose equivalent to a 2-, 3-, 4-, 5-, 6-, 7-, 8-, 9-, 10-, 20-, 50-, 100-, 250-, 500-, or 1000-fold reduction in a standard of care dose of a recombinant or purified EBV protein vaccine. In some embodiments, the anti-EBV antigen antibody titer produced in a subject administered an effective amount of an EBV RNA vaccine is equivalent to an anti-EBV antigen antibody titer produced in a control subject administered the standard of care dose of a recombinant or protein EBV protein vaccine, or a live attenuated or inactivated EBV vaccine, or an EBV VLP vaccine. In some embodiments, an effective amount of an EBV RNA (e.g., mRNA) vaccine is a dose equivalent to a 2-fold to 1000-fold (e.g., 2-fold to 100-fold, 10-fold to 1000-fold) reduction in the standard of care dose of a recombinant or purified EBV protein vaccine, wherein the anti-EBV antigen antibody titer produced in the subject is equivalent to an anti-EBV antigen antibody titer produced in a control subject administered the standard of care dose of a recombinant or purified EBV protein vaccine, or a live attenuated or inactivated EBV vaccine, or an EBV VLP vaccine.

[0379] In some embodiments, the effective amount of an EBV RNA (e.g., mRNA) vaccine is a dose equivalent to a 2 to 1000-, 2 to 900-, 2 to 800-, 2 to 700-, 2 to 600-, 2 to 500-, 2 to 400-, 2 to 300-, 2 to 200-, 2 to 100-, 2 to 90-, 2 to 80-, 2 to 70-, 2 to 60-, 2 to 50-, 2 to 40-, 2 to 30-, 2 to 20-, 2 to 10-, 2 to 9-, 2 to 8-, 2 to 7-, 2 to 6-, 2 to 5-, 2 to 4-, 2 to 3-, 3 to 1000-, 3 to 900-, 3 to 800-, 3 to 700-, 3 to 600-, 3 to 500-, 3 to 400-, 3 to 3 to 00-, 3 to 200-, 3 to 100-, 3 to 90-, 3 to 80-, 3 to 70-, 3 to 60-, 3 to 50-, 3 to 40-, 3 to 30-, 3 to 20-, 3 to 10-, 3 to 9-, 3 to 8-, 3 to 7-, 3 to 6-, 3 to 5-, 3 to 4-, 4 to 1000-, 4 to 900-, 4 to 800-, 4 to 700-, 4 to 600-, 4 to 500-, 4 to 400-, 4 to 300-, 4 to 200-, 4 to 100-, 4 to 90-, 4 to 80-, 4 to 70-, 4 to 60-, 4 to 50-, 4 to 40-, 4 to 30-, 4 to 20-, 4 to 10-, 4 to 9-, 4 to 8-, 4 to 7-, 4 to 6-, 4 to 5-, 4 to 4-, 5 to 1000-, 5 to 900-, 5 to 800-, 5 to 700-, 5 to 600-, 5 to 500-, 5 to 400-, 5 to 300-, 5 to 200-, 5 to 100-, 5 to 90-, 5 to 80-, 5 to 70-, 5 to 60-, 5 to 50-, 5 to 40-, 5 to 30-, 5 to 20-, 5 to 10-, 5 to 9-, 5 to 8, 5 to 7-, 5 to 6-, 6 to 1000-, 6 to 900-, 6 to 800-, 6 to 700-, 6 to 600-, 6 to 500-, 6 to 400-, 6 to 300-, 6 to 200-, 6 to 100-, 6 to 90-, 6 to 80-, 6 to 70-, 6 to 60-, 6 to 50-, 6 to 40-, 6 to 30-, 6 to 20-, 6 to 10-, 6 to 9-, 6 to 8-, 6 to 7-, 7 to 1000-, 7 to 900-, 7 to 800-, 7 to 700-, 7 to 600-, 7 to 500-, 7 to 400-, 7 to 300-, 7 to 200-, 7 to 100-, 7 to 90-, 7 to 80-, 7 to 70-, 7 to 60-, 7 to 50-, 7 to 40-, 7 to 30-, 7 to 20-, 7 to 10-, 7 to 9-, 7 to 8-, 8 to 1000-, 8 to 900-, 8 to 800-, 8 to 700-, 8 to 600-, 8 to 500-, 8 to 400-, 8 to 300-, 8 to 200-, 8 to 100-, 8 to 90-, 8 to 80-, 8 to 70-, 8 to 60-, 8 to 50-, 8 to 40-, 8 to 30-, 8 to 20-, 8 to 10-, 8 to 9-, 9 to 1000-, 9 to 900-, 9 to 800-, 9 to 700-, 9 to 600-, 9 to 500-, 9 to 400-, 9 to 300-, 9 to 200-, 9 to 100-, 9 to 90-, 9 to 80-, 9 to 70-, 9 to 60-, 9 to 50-, 9 to 40-, 9 to 30-, 9 to 20-, 9 to 10-, 10 to 1000-, 10 to 900-, 10 to 800-, 10 to 700-, 10 to 600-, 10 to 500-, 10 to 400-, 10 to 300-, 10 to 200-, 10 to 100-, 10 to 90-, 10 to 80-, 10 to 70-, 10 to 60-, 10 to 50-, 10 to 40-, 10 to 30-, 10 to 20-, 20 to 1000-, 20 to 900-, 20 to 800-, 20 to 700-, 20 to 600-, 20 to 500-, 20 to 400-, 20 to 300-, 20 to 200-, 20 to 100-, 20 to 90-, 20 to 80-, 20 to 70-, 20 to 60-, 20 to 50-, 20 to 40-, 20 to 30-, 30 to 1000-, 30 to 900-, 30 to 800-, 30 to 700-, 30 to 600-, 30 to 500-, 30 to 400-, 30 to 300-, 30 to 200-, 30 to 100-, 30 to 90-, 30 to 80-, 30 to 70-, 30 to 60-, 30 to 50-, 30 to 40-, 40 to 1000-, 40 to 900-, 40 to 800-, 40 to 700-, 40 to 600-, 40 to 500-, 40 to 400-, 40 to 300-, 40 to 200-, 40 to 100-, 40 to 90-, 40 to 80-, 40 to 70-, 40 to 60-, 40 to 50-, 50 to 1000-, 50 to 900-, 50 to 800-, 50 to 700-, 50 to 600-, 50 to 500-, 50 to 400-, 50 to 300-, 50 to 200-, 50 to 100-, 50 to 90-, 50 to 80-, 50 to 70-, 50 to 60-, 60 to 1000-, 60 to 900-, 60 to 800-, 60 to 700-, 60 to 600-, 60 to 500-, 60 to 400-, 60 to 300-, 60 to 200-, 60 to 100-, 60 to 90-, 60 to 80-, 60 to 70-, 70 to 1000-, 70 to 900-, 70 to 800-, 70 to 700-, 70 to 600-, 70 to 500-, 70 to 400-, 70 to 300-, 70 to 200-, 70 to 100-, 70 to 90-, 70 to 80-, 80 to 1000-, 80 to 900-, 80 to 800-, 80 to 700-, 80 to 600-, 80 to 500-, 80 to 400-, 80 to 300-, 80 to 200-, 80 to 100-, 80 to 90-, 90 to 1000-, 90 to 900-, 90 to 800-, 90 to 700-, 90 to 600-, 90 to 500-, 90 to 400-, 90 to 300-, 90 to 200-, 90 to 100-, 100 to 1000-, 100 to 900-, 100 to 800-, 100 to 700-, 100 to 600-, 100 to 500-, 100 to 400-, 100 to 300-, 100 to 200-, 200 to 1000-, 200 to 900-, 200 to 800-, 200 to 700-, 200 to 600-, 200 to 500-, 200 to 400-, 200 to 300-, 300 to 1000-, 300 to 900-, 300 to 800-, 300 to 700-, 300 to 600-, 300 to 500-, 300 to 400-, 400 to 1000-, 400 to 900-, 400 to 800-, 400 to 700-, 400 to 600-, 400 to 500-, 500 to 1000-, 500 to 900-, 500 to 800-, 500 to 700-, 500 to 600-, 600 to 1000-, 600 to 900-, 600 to 800-, 600 to 700-, 700 to 1000-, 700 to 900-, 700 to 800-, 800 to 1000-, 800 to 900-, or 900 to 1000-fold reduction in the standard of care dose of a recombinant EBV protein vaccine. In some embodiments, such as the foregoing, the anti-EBV antigen antibody titer produced in the subject is equivalent to an anti-EBV antigen antibody titer produced in a control subject administered the standard of care dose of a recombinant or purified EBV protein vaccine, or a live attenuated or inactivated EBV vaccine, or an EBV VLP vaccine. In some embodiments, the effective amount is a dose equivalent to (or equivalent to an at least) 2-, 3-, 4-, 5-, 6-, 7-, 8-, 9-, 10-, 20-, 30-, 40-, 50-, 60-, 70-, 80-, 90-, 100-, 110-, 120-, 130-, 140-, 150-, 160-, 170-, 1280-, 190-, 200-, 210-, 220-, 230-, 240-, 250-, 260-, 270-, 280-, 290-, 300-, 310-, 320-, 330-, 340-, 350-, 360-, 370-, 380-, 390-, 400-, 410-, 420-, 430-, 440-, 450-, 460-, 470-, 480-, 490-, 500-, 510-, 520-, 530-, 540-, 550-, 560-, 570-, 580-, 590-, 600-, 610-, 620-, 630-, 640-, 650-, 660-, 670-, 680-, 690-, 700-, 710-, 720-, 730-, 740-, 750-, 760-, 770-, 780-, 790-, 800-, 810-, 820-, 830-, 840-, 850-, 860-, 870-, 880-, 890-, 900-, 910-, 920-, 930-, 940-, 950-, 960-, 970-, 980-, 990-, or 1000-fold reduction in the standard of care dose of a recombinant EBV protein vaccine. In some embodiments, such as the foregoing, an anti-EBV antigen antibody titer produced in the subject is equivalent to an anti-EBV antigen antibody titer produced in a control subject administered the standard of care dose of a recombinant or purified EBV protein vaccine, or a live attenuated or inactivated EBV vaccine, or an EBV VLP vaccine.

[0380] In some embodiments, the effective amount of an EBV RNA (e.g., mRNA) vaccine is a total dose of 50-1000 μg. In some embodiments, the effective amount of an EBV RNA (e.g., mRNA) vaccine is a total dose of 50-1000, 50-900, 50-800, 50-700, 50-600, 50-500, 50-400, 50-300, 50-200, 50-100, 50-90, 50-80, 50-70, 50-60, 60-1000, 60-900, 60-800, 60-700, 60-600, 60-500, 60-400, 60-300, 60-200, 60-100, 60-90, 60-80, 60-70, 70-1000, 70-900, 70-800, 70-700, 70-600, 70-500, 70-400, 70-300, 70-200, 70-100, 70-90, 70-80, 80-1000, 80-900, 80-800, 80-700, 80-600, 80-500, 80-400, 80-300, 80-200, 80-100, 80-90, 90-1000, 90-900, 90-800, 90-700, 90-600, 90-500, 90-400, 90-300, 90-200, 90-100, 100-1000, 100-900, 100-800, 100-700, 100-600, 100-500, 100-400, 100-300, 100-200, 200-1000, 200-900, 200-800, 200-700, 200-600, 200-500, 200-400, 200-300, 300-1000, 300-900, 300-800, 300-700, 300-600, 300-500, 300-400, 400-1000, 400-900, 400-800, 400-700, 400-600, 400-500, 500-1000, 500-900, 500-800, 500-700, 500-600, 600-1000, 600-900, 600-900, 600-700, 700-1000, 700-900, 700-800, 800-1000, 800-900, or 900-1000 μg. In some embodiments, the effective amount of an EBV RNA (e.g., mRNA) vaccine is a total dose of 50, 100, 150, 200, 250, 300, 350, 400, 450, 500, 550, 600, 650, 700, 750, 800, 850, 900, 950 or 1000 μg. In some embodiments, the effective amount is a dose of 25-500 μg administered to the subject a total of two times. In some embodiments, the effective amount of an EBV RNA (e.g., mRNA) vaccine is a dose of 25-500, 25-400, 25-300, 25-200, 25-100, 25-50, 50-500, 50-400, 50-300, 50-200, 50-100, 100-500, 100-400, 100-300, 100-200, 150-500, 150-400, 150-300, 150-200, 200-500, 200-400, 200-300, 250-500, 250-400, 250-300, 300-500, 300-400, 350-500, 350-400, 400-500 or 450-500 μg administered to the subject a total of two times. In some embodiments, the effective amount of an EBV RNA (e.g., mRNA) vaccine is a total dose of 25, 50, 100, 150, 200, 250, 300, 350, 400, 450, or 500 μg administered to the subject a total of two times.

[0381] Vaccine efficacy may be assessed using standard analyses (see, e.g., Weinberg et al., J Infect Dis. 2010 Jun. 1; 201(11):1607-10). For example, vaccine efficacy may be measured by double-blind, randomized, clinical controlled trials. Vaccine efficacy may be expressed as a proportionate reduction in disease attack rate (AR) between the unvaccinated (ARU) and vaccinated (ARV) study cohorts and can be calculated from the relative risk (RR) of disease among the vaccinated group with use of the following formulas:

Efficacy=(ARU−ARV)/ARU×100; and

Efficacy=(1−RR)×100.

[0382] Likewise, vaccine effectiveness may be assessed using standard analyses (see, e.g., Weinberg et al., J Infect Dis. 2010 Jun. 1; 201(11):1607-10). Vaccine effectiveness is an assessment of how a vaccine (which may have already proven to have high vaccine efficacy) reduces disease in a population. This measure can assess the net balance of benefits and adverse effects of a vaccination program, not just the vaccine itself, under natural field conditions rather than in a controlled clinical trial. Vaccine effectiveness is proportional to vaccine efficacy (potency) but is also affected by how well target groups in the population are immunized, as well as by other non-vaccine-related factors that influence the ‘real-world’ outcomes of hospitalizations, ambulatory visits, or costs. For example, a retrospective case control analysis may be used, in which the rates of vaccination among a set of infected cases and appropriate controls are compared. Vaccine effectiveness may be expressed as a rate difference, with use of the odds ratio (OR) for developing infection despite vaccination:

Effectiveness=(1−OR)×100.

[0383] In some embodiments, efficacy of the EBV vaccine is at least 60% relative to unvaccinated control subjects. For example, efficacy of the EBV vaccine may be at least 65%, at least 70%, at least 75%, at least 80%, at least 85%, at least 95%, at least 98%, or 100% relative to unvaccinated control subjects.

[0384] Sterilizing Immunity.

[0385] Sterilizing immunity refers to a unique immune status that prevents effective pathogen infection into the host. In some embodiments, the effective amount of an EBV vaccine of the present disclosure is sufficient to provide sterilizing immunity in the subject for at least 1 year. For example, the effective amount of an EBV vaccine of the present disclosure is sufficient to provide sterilizing immunity in the subject for at least 2 years, at least 3 years, at least 4 years, or at least 5 years. In some embodiments, the effective amount of an EBV vaccine of the present disclosure is sufficient to provide sterilizing immunity in the subject at an at least 5-fold lower dose relative to control. For example, the effective amount may be sufficient to provide sterilizing immunity in the subject at an at least 10-fold lower, 15-fold, or 20-fold lower dose relative to a control.

[0386] Detectable Antigen.

[0387] In some embodiments, the effective amount of an EBV vaccine of the present disclosure is sufficient to produce detectable levels of EBV antigen as measured in serum of the subject at 1-72 hours post administration.

[0388] Titer.

[0389] An antibody titer is a measurement of the amount of antibodies within a subject, for example, antibodies that are specific to a particular antigen (e.g., an anti-EBV antigen). Antibody titer is typically expressed as the inverse of the greatest dilution that provides a positive result. Enzyme-linked immunosorbent assay (ELISA) is a common assay for determining antibody titers, for example.

[0390] In some embodiments, the effective amount of an EBV vaccine of the present disclosure is sufficient to produce a 1,000-10,000 neutralizing antibody titer produced by neutralizing antibody against the EBV antigen as measured in serum of the subject at 1-72 hours post administration. In some embodiments, the effective amount is sufficient to produce a 1,000-5,000 neutralizing antibody titer produced by neutralizing antibody against the EBV antigen as measured in serum of the subject at 1-72 hours post administration. In some embodiments, the effective amount is sufficient to produce a 5,000-10,000 neutralizing antibody titer produced by neutralizing antibody against the EBV antigen as measured in serum of the subject at 1-72 hours post administration.

[0391] In some embodiments, the neutralizing antibody titer is at least 100 NT₅₀. For example, the neutralizing antibody titer may be at least 200, 300, 400, 500, 600, 700, 800, 900 or 1000 NT₅₀. In some embodiments, the neutralizing antibody titer is at least 10,000 NT₅₀.

[0392] In some embodiments, the neutralizing antibody titer is at least 100 neutralizing units per milliliter (NU/mL). For example, the neutralizing antibody titer may be at least 200, 300, 400, 500, 600, 700, 800, 900 or 1000 NU/mL. In some embodiments, the neutralizing antibody titer is at least 10,000 NU/mL.

[0393] In some embodiments, an anti-EBV antigen antibody titer produced in the subject is increased by at least 1 log relative to a control. For example, an anti-EBV antigen antibody titer produced in the subject may be increased by at least 2, 3, 4, 5, 6, 7, 8, 9 or 10 log relative to a control.

[0394] In some embodiments, an anti-EBV antigen antibody titer produced in the subject is increased at least 2 times relative to a control. For example, an anti-EBV antigen antibody titer produced in the subject is increased by at least 3, 4, 5, 6, 7, 8, 9 or 10 times relative to a control.

[0395] In some embodiments, a geometric mean, which is the nth root of the product of n numbers, is generally used to describe proportional growth. Geometric mean, in some embodiments, is used to characterize antibody titer produced in a subject.

[0396] A control may be, for example, an unvaccinated subject, or a subject administered a live attenuated EBV vaccine, an inactivated EBV vaccine, or a protein subunit EBV vaccine.

### EXAMPLES

### Example 1

[0397] EBV glycoprotein 350 (gp350) variants were produced and their expression tested in HeLa cells. HeLa cells were transiently transfected for 24 hours with mRNA encoding each of EBV glycoprotein 350 (gp350) variants (SEQ ID NOs: 185, 182, 207, and 208). Flow cytometry analyses (FIG. 1A, 1 μg dose mRNA) and immunoassays (FIG. 1B, 1 μg dose mRNA; FIG. 1C, 0.5 μg dose mRNA) using an EBV neutralizing antibody that binds conformational epitopes in gp350 (“72A1”) demonstrate that all EBV gp350 variants tested show equivalent expression at the surface of the transfected HeLa cells. Unless otherwise stated, all mRNA vaccines may be formulated in lipid nanoparticles comprising Compound 1 lipids, e.g., 20-60% ionizable cationic lipid, 5-25% non-cationic lipid, 25-55% sterol, and 0.5-15% PEG-modified lipid.

### Example 2

[0398] EBV gp350 mRNA sequences with two different 5′ UTR sequences (SEQ ID NOs: 81 and 204) were produced and their expression tested in HeLa cells. HeLa cells were transiently transfected for 24 hours with a 0.5 μg dose of mRNA encoding the EBV gp350 antigens. Flow cytometry analyses (FIG. 2A) and immunoassays (FIG. 2B) using the anti-72A1 antibody demonstrate that both EBV gp350 mRNA constructs tested show equivalent expression at the surface of the transfected HeLa cells.

### Example 3

[0399] Balb/c mice were vaccinated intramuscularly with EBV vaccines comprising mRNA encoding EBV gp350 variants (SEQ ID NOs: 185, 182, 207, and 208) formulated in a lipid nanoparticle. A 2 μg dose was administered on Day 1 and then again on Day 22. Mice were bled on Day 21 and Day 43. Results demonstrate that all the EBV gp350 vaccines tested induced serum gp350-specific IgG antibody titers at day 21 (3 weeks post prime) and day 43 (3 weeks post boost) following vaccination (FIG. 3).

### Example 4

[0400] Additional EBV antigens and antigen complexes were produced and their expression tested in HeLa cells. HeLa cells were transiently transfected for 24 hours with 0.25 μg of (1) mRNA encoding EBV gH (SEQ ID NO: 187), mRNA encoding EBV gL (SEQ ID NO: 188), and mRNA encoding EBV gp42 (SEQ ID NO:189) (EBV gH/gL/gp42 UTR A); (2) mRNA encoding EBV gH (SEQ ID NO: 201), mRNA encoding EBV gL (SEQ ID NO: 202), and mRNA encoding EBV gp42 (SEQ ID NO: 203) (EBV gH/gL/gp42 UTR B); (3) mRNA encoding EBV gH (SEQ ID NO: 187) and mRNA encoding gp42 (SEQ ID NO:189); or (4) mRNA encoding EBV gp42 (SEQ ID NO:189). Flow cytometry analyses (FIG. 4A) and immunoassays (FIG. 4B) using an anti-gH/gL/gp42 (2D4) antibody demonstrate that all EBV mRNA constructs tested show equivalent expression at the surface of the transfected HeLa cells.

### Example 5

[0401] Balb/c mice were vaccinated intramuscularly with EBV vaccines comprising (1) mRNA encoding EBV gH (SEQ ID NO: 187), mRNA encoding EBV gL (SEQ ID NO: 188), and mRNA encoding EBV gp42 (SEQ ID NO: 189); (2) mRNA encoding EBV gp350 (SEQ ID NO: 185); or (3) mRNA encoding EBV gH (SEQ ID NO: 187), mRNA encoding EBV gL (SEQ ID NO: 188), mRNA encoding EBV gp42 (SEQ ID NO: 189), and mRNA encoding EBV gp350 (SEQ ID NO: 185). A 2 μg dose was administered on Day 1 and then again on Day 29. Mice were bled on Day 28 and Day 57. Results demonstrate that all the EBV vaccines tested induced neutralizing antibody titers at day 28 (4 weeks post prime) and day 57 (4 weeks post boost) following vaccination (FIG. 5).

### Example 6

[0402] HeLa cells were transiently transfected for 24 hours with 0.5 μg of (1) mRNA encoding EBV gH (SEQ ID NO: 201) and mRNA encoding EBV gL (SEQ ID NO: 202); or (2) mRNA encoding EBV gH only (SEQ ID NO: 201). Flow cytometry analyses (FIG. 6A) using an anti-gH/gL (2A8) antibody or an anti-gH/gL/gp42 (2D4) antibody demonstrate that the 2A8 antibody binds specifically to EBV gL expressed on the surface of the HeLa cells (compare to data presented in Example 4). Immunoassays following 24 hour transfection with 0.25 μg of either (1) mRNA encoding EBV mRNA encoding EBV gH (SEQ ID NO: 187) and mRNA encoding EBV gL (SEQ ID NO: 188); or (2) mRNA encoding EBV mRNA encoding EBV gH (SEQ ID NO: 201) and mRNA encoding EBV gL (SEQ ID NO: 202) show comparable expression of both EBV antigen complexes at the surface of HeLa cells.

### Example 7

[0403] Three additional immunogenicity studies were performed using various mRNA vaccines of the present disclosure (formulated in lipid nanoparticles) and various antigen-specific antibodies. Balb/c mice were vaccinated intramuscularly with (1) a 5 μg dose or a 1 μg dose of mRNA encoding EBV gH (SEQ ID NO: 187) and mRNA encoding EBV gL (SEQ ID NO: 188); (2) a 7.5 μg dose or a 1.5 μg dose of mRNA encoding EBV gH (SEQ ID NO: 187), mRNA encoding EBV gL (SEQ ID NO: 188), and mRNA encoding EBV gB (SEQ ID NO: 209); (3) a 7.5 μg dose or a 1.5 μg dose of mRNA encoding EBV gH (SEQ ID NO: 187), mRNA encoding EBV gL (SEQ ID NO: 188), and mRNA encoding EBV gp350 (SEQ ID NO: 185); or (4) a 10 μg dose or a 2 μg dose of mRNA encoding EBV gH (SEQ ID NO: 187), mRNA encoding EBV gL (SEQ ID NO: 188), mRNA encoding EBV gB (SEQ ID NO: 209), and mRNA encoding EBV gp350 (SEQ ID NO: 185). Mice were bled on Day 57 Results following detection with anti-gH/gL antibody (FIG. 7), anti-gB antibody (FIG. 8), or anti-gp350 antibody (FIG. 9) demonstrate induction of EBV antigen-specific neutralizing antibodies.

### Example 8

[0404] Mice were vaccinated with a 2 μg dose of mRNA encoding one of four EBV latent genes (LMP1 (SEQ ID NO: 179), LMP2 (SEQ ID NO: 181), EBNA1^{Δ1-400} (SEQ ID NO: 178) or EBNA3A (SEQ ID NO: 177)) or a combination of all four mRNA vaccines (LMP1 (SEQ ID NO: 179), LMP2 (SEQ ID NO: 181), EBNA1^{Δ1-400} (SEQ ID NO: 178) and EBNA3A (SEQ ID NO: 177). Cells were harvested from vaccinated mice and stimulated with LMP1, LMP2, EBNA1 or EBNA3A peptides. All peptide libraries comprise 15mer peptides overlapping by 11 amino acids. CD8 T cell responses are shown in FIGS. 10A-10D, and CD4 T cell responses are shown in FIGS. 11A-11D.

### Example 9

[0405] mRNA encoding EBV glycoprotein H-glycoprotein L (gH-gL) linked constructs (SEQ ID NO: 218 or 221) were produced and their expression tested in HeLa cells. HeLa cells were transiently transfected for 24 hours with mRNA encoding two EBV gH-gL variants with different linkers (SEQ ID NO: 218 or SEQ ID NO: 221), or with mRNA encoding EBV gH (EBV gH mRNA; SEQ ID NO: 228) and mRNA encoding EBV gL (EBV gL mRNA; SEQ ID NO: 229). Flow cytometry analyses (FIG. 13A, 0.5 μg dose of EBV gH-gL linked mRNA or 0.25 μg dose of each of EBV gH mRNA and EBV gL mRNA) and immunoassays (FIG. 13B; 0.5 μg dose of gH-gL linked construct or 0.25 μg dose of each of gH and gL) using EBV neutralizing antibodies 2A8 and CL40, which binds conformational epitopes in gH, demonstrate that both EBV gH-gL constructs (SEQ ID NO: 218 and 221) tested show expression at the surface of the transfected HeLa cells.

### Example 10

[0406] In a further immunogenicity study to test the effect of different untranslated regions (UTRs), mice were vaccinated intramuscularly with lipid nanoparticles (comprising Compound 1 lipids, e.g., 20-60% ionizable cationic lipid, 5-25% non-cationic lipid, 25-55% sterol, and 0.5-15% PEG-modified lipid) comprising (1) 10 μg mRNA encoding gp350 (SEQ ID NO: 185), mRNA encoding gH (SEQ ID NO: 187), mRNA encoding gL (SEQ ID NO: 188), mRNA encoding LMP2 antigen (SEQ ID NO: 181), and mRNA encoding EBNA1 antigen (SEQ ID NO: 178), each of the transcripts comprising UTRA; (2) 10 μg mRNA encoding gp350 (SEQ ID NO: 185), mRNA encoding gH (SEQ ID NO: 187), mRNA encoding gL (SEQ ID NO: 188), mRNA encoding LMP2 antigen (SEQ ID NO: 181), and mRNA encoding EBNA1 antigen (SEQ ID NO: 178), each of the transcripts comprising UTRB; (3) 2 μg mRNA encoding EBNA1 antigen (SEQ ID NO: 178) with UTRB; (4) 2 μg mRNA encoding LMP2 antigen with UTRB; or (5) empty lipid nanoparticles. The mice received one dose on Day 1 and a second dose on Day 29. Blood samples were taken just prior to dosing, and on Day 57. Spleens were collected from a subset of animals on Day 36. Cells were harvested from vaccinated mice and stimulated with peptides from an EBNA1 peptide library (FIG. 14) or an LMP2 library (FIG. 15). The peptide library comprised 15mer peptides overlapping by 11 amino acids. CD4 T cell cytokine responses for the EBV formulations (groups 1 and 2), the EBNA1 formulation (group 3), and the control (empty nanoparticles; group 5) are shown in the top row of FIG. 14; the bottom row of FIG. 14 shows CD8 T cell responses. FIG. 15 shows the CD4 T cell responses (top row) and CD8 T cell cytokine responses (bottom row) for EBV formulations (groups 1 and 2), the LMP2 formulation (group 4), and the control (empty nanoparticles; group 5). Similar T cell responses were found between groups regardless of the UTR used.

### Example 11

[0407] The constructs were tested in a non-human primate (Rhesus macaque) model. The subjects were vaccinated intramuscularly with lipid nanoparticles comprising (1) 200 μg of mRNA encoding gp350 (SEQ ID NO: 185), mRNA encoding gH (SEQ ID NO: 187), mRNA encoding gL (SEQ ID NO: 188), mRNA encoding LMP2 antigen (SEQ ID NO: 181), and mRNA encoding EBNA1 antigen (SEQ ID NO: 178); (2) 50 μg of mRNA encoding gp350 (SEQ ID NO: 185), mRNA encoding gH (SEQ ID NO: 187), mRNA encoding gL (SEQ ID NO: 188), mRNA encoding LMP2 antigen (SEQ ID NO: 181), and mRNA encoding EBNA1 antigen (SEQ ID NO: 178); or (3) 200 μg of mRNA encoding a control. As shown in FIG. 16, the subjects received one dose on day 0 and a second dose on day 28. Blood samples were drawn on days 0, 27, 28, 60, 90, 120, 150, and 180. Results following detection with anti-gp350 titer and anti-gH/gL antibody demonstrate that vaccination with the selected formulations results in increased and durable anti-gp350 and anti-gH/gL antibody titers (FIG. 16). While neutralizing antibody titers were found to be durable at high doses, a significant drop in neutralizing antibody titers at low doses of the EBV vaccine was observed (FIG. 17).

### Example 12

[0408] The effect of various downstream processes on EBV vaccine immunogenicity was examined. EBV vaccines comprising gp350 (SEQ ID NO: 185), gH (SEQ ID NO: 187), and gL (SEQ ID NO: 188) were synthesized using different downstream purification processes. The resulting mRNA was used to form doses (10μg, 3μg, and 1 μg doses for each of the four groups; PBS was used as a control group; n=8/group) that were administered to mice on Days 1 and 22. Blood samples were collected on Days 1, 21, 22, 36, 82, and 142. Antibody titers from gp250 (FIG. 18) and for gH/gL (FIG. 19) were measured.

### EQUIVALENTS

[0409] All references, patents and patent applications disclosed herein are incorporated by reference with respect to the subject matter for which each is cited, which in some cases may encompass the entirety of the document.

[0410] The indefinite articles “a” and “an,” as used herein in the specification and in the claims, unless clearly indicated to the contrary, should be understood to mean “at least one.”

[0411] It should also be understood that, unless clearly indicated to the contrary, in any methods claimed herein that include more than one step or act, the order of the steps or acts of the method is not necessarily limited to the order in which the steps or acts of the method are recited.

[0412] In the claims, as well as in the specification above, all transitional phrases such as “comprising,” “including,” “carrying,” “having,” “containing,” “involving,” “holding,” “composed of,” and the like are to be understood to be open-ended, i.e., to mean including but not limited to. Only the transitional phrases “consisting of” and “consisting essentially of” shall be closed or semi-closed transitional phrases, respectively, as set forth in the United States Patent Office Manual of Patent Examining Procedures, Section 2111.03.

[0413] The terms “about” and “substantially” preceding a numerical value mean±10% of the recited numerical value.

[0414] Where a range of values is provided, each value between the upper and lower ends of the range are specifically contemplated and described herein.

[0415] The entire contents of International Application Nos. PCT/US2015/02740, PCT/US2016/043348, PCT/US2016/043332, PCT/US2016/058327, PCT/US2016/058324, PCT/US2016/058314, PCT/US2016/058310, PCT/US2016/058321, PCT/US2016/058297, PCT/US2016/058319, and PCT/US2016/058314 are incorporated herein by reference.

### SEQUENCE LISTING

[0416] It should be understood that any of the mRNA sequences described herein may include a 5′ UTR and/or a 3′ UTR. The UTR sequences may be selected from the following sequences, or other known UTR sequences may be used. It should also be understood that any of the mRNA constructs described herein may further comprise a polyA tail and/or cap (e.g., 7mG(5′)ppp(5′)NlmpNp). Further, while many of the mRNAs and encoded antigen sequences described herein include a signal peptide and/or a peptide tag (e.g., C-terminal His tag), it should be understood that the indicated signal peptide and/or peptide tag may be substituted for a different signal peptide and/or peptide tag, or the signal peptide and/or peptide tag may be omitted.

5′ UTR: GGGAAAUAAGAGAGAAAAGAAGAGUAAGAAGAAAUAUAAGAGCCACC
(SEQ ID NO: 1)
5′ UTR: GGGAAAUAAGAGAGAAAAGAAGAGUAAGAAGAAAUAUAAGACCCC
GGCGCCGCCACC (SEQ ID NO: 104)
3′ UTR: UGAUAAUAGGCUGGAGCCUCGGUGGCCAUGCUUCUUGCCCCUUGGG
CCUCCCCCCAGCCCCUCCUCCCCUUCCUGCACCCGUACCCCCGUGGUCUUUGAAUAAAGUCUGAGU
GGGCGGC (SEQ ID NO: 3)
3′ UTR: UGAUAAUAGGCUGGAGCCUCGGUGGCCUAGCUUCUUGCCCCUUGGG
CCUCCCCCCAGCCCCUCCUCCCCUUCCUGCACCCGUACCCCCGUGGUCUUUGAAUAAAGUCUGAGU
GGGCGGC (SEQ ID NO: 106)

SEQ
ID
NO:

EBNA MO1

| SEQ ID NO: 130 consists of from 5′ end to 3′ end, | | 130 |
|---|---|---|
| 5′ UTR SEQ ID NO: 1, mRNA ORF SEQ ID NO: 2, and | | |
| 3′ UTR SEQ ID NO: 3. | | |
| Chemistry | 1-methylpseudouridine | |
| Cap | 7mG(5′)ppp(5′)NlmpNp | |
| 5′ UTR | GGGAAAUAAGAGAGAAAAGAAGAGUAAGAAGAAAUAUA | 1 |
| | AGAGCCACC | |
| ORF of mRNA | AUGAGCGACGAGGGUCCGGGCACAGGACCCGGUAACGGG | 2 |
| Construct | UUGGGCGAAAAGGGUGACACUAGCGGGCCCGAAGGUUCC | |
| (excluding | GGCGGAUCUGGCCCGCAACGCAGAGGUGGUGAUAACCAC | |
| the stop | GGUCGCGGUAGAGGCAGAGGCCGUGGCCGGGGUGGCGGA | |
| codon) | AGGCCCGGUGCCCCUGGAGGGUCAGGGUCUGGCCCAAGG | |
| | CACCGUGAUGGGGUGCGUCGCCCCCAGAAACGCCCGUCCU | |
| | GUAUCGGCUGCAAGGGCACGCAUGGCGGAACGGGAGGUG | |
| | GCGCAGGAGCCGGAGGUGCAAGAGGUCGCGGGGGGUCAG | |
| | GGGGGAGAGGUAGAGGGGGAUCAGGGGGGCGGAGAGGGC | |
| | GGGGUCGAGAAAGAGCAAGAGGUGGCUCCAGAGAGCGCG | |
| | CUCGGGGUCGCGGGCGAGGCCGGGGUGAAAAACGGCCCC | |
| | GGAGCCCAUCCUCGCAAUCAUCAAGCUCGGGAUCGCCACC | |
| | UCGGCGGCCGCCCCCCGGCAGGCGUCCCUUUUUCCACCCA | |
| | GUGGGCGAAGCCGACUACUUCGAGUACCACCAGGAGGGA | |
| | GGACCGGAUGGUGAGCCGGAUGUUCCUCCCGGCGCCAUC | |
| | GAACAAGGUCCUGCCGAUGAUCCAGGCGAGGGGCCCUCA | |
| | ACAGGCCCCCGAGGGCAGGGGGACGGGGGACGUCGGAAG | |
| | AAAGGAGGCUGGUUUGGCAAGCACCGAGGACAGGGGGGU | |
| | AGCAACCCGAAAUUUGAGAACAUCGCCGAGGGGCUCAGG | |
| | GCUCUCCUAGCCCGUAGCCACGUCGAAAGAACUACCGAU | |
| | GAGGGCACCUGGGUUGCCGGCGUGUUCGUGUACGGGGGU | |
| | AGCAAGACCUCUCUAUACAACCUUCGGAGGGGGACUGCA | |
| | CUUGCUAUCCCCCAAUGCCGCCUCACACCACUGUCUCGCC | |
| | UGCCAUUCGGCAUGGCCCCCGGCCCGGGGCCACAGCCUGG | |
| | GCCCCUACGGGAAUCUAUUGUUUGCUAUUUUAUGGUGUU | |
| | CCUGCAGACCCAUAUCUUCGCAGAAGUCCUGAAAGACGC | |
| | CAUCAAAGACUUAGUUAUGACUAAACCCGCACCCACCUG | |
| | CAACAUUCGCGUGACCGUAUGCAGCUUUGAUGAUGGCGU | |
| | CGAUCUGCCCCCAUGGUUCCCCCCUAUGGUCGAGGGCGCC | |
| | GCCGCCGAAGGGGACGACGGGGAUGACGGGGAUGAAGGC | |
| | GGGGACGGCGAUGAGGGCGAGGAGGGCCAGGAA | |
| 3′ UTR | UGAUAAUAGGCUGGAGCCUCGGUGGCCAUGCUUCUUGCC | 3 |
| | CCUUGGGCCUCCCCCCAGCCCCUCCUCCCCUUCCUGCACC | |
| | CGUACCCCCGUGGUCUUUGAAUAAAGUCUGAGUGGGCGG | |
| | C | |
| Corresponding | MSDEGPGTGPGNGLGEKGDTSGPEGSGGSGPQRRGGDNHGR | 4 |
| amino acid | GRGRGRGRGGGRPGAPGGSGSGPRHRDGVRRPQKRPSCIGCK | |
| sequence | GTHGGTGGGAGAGGARGRGGSGGRGRGGSGGRRGRGRERA | |
| | RGGSRERARGRGRGRGEKRPRSPSSQSSSSGSPPRRPPPGRRPF | |
| | FHPVGEADYFEYHQEGGPDGEPDVPPGAIEQGPADDPGEGPST | |
| | GPRGQGDGGRRKKGGWFGKHRGQGGSNPKFENIAEGLRALL | |
| | ARSHVERTTDEGTWVAGVFVYGGSKTSLYNLRRGTALAIPQC | |
| | RLTPLSRLPFGMAPGPGPQPGPLRESIVCYFMVFLQTHIFAEVL | |
| | KDAIKDLVMTKPAPTCNIRVTVCSFDDGVDLPPWFPPMVEGA | |
| | AAEGDDGDDGDEGGDGDEGEEGQE | |
| PolyA tail | 100 nt | |

EBNA1_mod_002

| SEQ ID NO: 131 consists of from 5′ end to 3′ end: | | 131 |
|---|---|---|
| 5′ UTR SEQ ID NO: 1, mRNA ORF SEQ ID NO: 5, and | | |
| 3′ UTR SEQ ID NO: 3 | | |
| Chemistry | 1-methylpseudouridine | |
| Cap | 7mG(5′)ppp(5′)NlmpNp | |
| 5′ UTR | GGGAAAUAAGAGAGAAAAGAAGAGUAAGAAGAAAUAUA | 1 |
| | AGAGCCACC | |
| ORF of mRNA | AUGAGUGACGAGGGACCUGGGACUGGCCCCGGGAACGGU | 5 |
| Construct | CUGGGUGAGAAAGGUGACACGUCUGGUCCUGAAGGAUCU | |
| (excluding | GGCGGUUCAGGGCCGCAGCGCAGAGGAGGAGACAACCAC | |
| the stop | GGUAGAGGACGUGGACGCGGGAGAGGCCGAGGGGGCGGA | |
| codon) | AGACCUGGUGCACCGGGCGGUUCCGGCUCGGGGCCCCGCC | |
| | ACAGGGAUGGGGUGCGGAGACCACAGAAGCGCCCCUCUU | |
| | GCAUCGGCUGCAAGGGAACCCAUGGGGGUACCGGAGGGG | |
| | GAGCUGGUGCAGGUGGCGCCCGUGGUAGGGGUGGCAGCG | |
| | GGGGGCGUGGAAGAGGUGGUUCAGGCGGACGGAGGGGAC | |
| | GCGGACGUGAACGUGCCCGGGGAGGAUCCCGGGAGAGGG | |
| | CACGGGGCCGCGGCAGAGGCAGAGGGGAGAAGAGACCUA | |
| | GAUCCCCUAGCUCUCAAUCCAGCAGCAGUGGGUCCCCCCC | |
| | GAGGCGACCGCCUCCAGGUAGGCGCCCUUUCUUCCACCCC | |
| | GUUGGCGAGGCAGAUUACUUCGAAUAUCAUCAAGAGGGG | |
| | GGGCCCGAUGGCGAGCCGGACGUACCACCCGGUGCUAUC | |
| | GAGCAAGGUCCGGCUGACGAUCCUGGUGAAGGGCCAAGU | |
| | ACCGGACCUAGGGGGCAGGGCGACGGUGGUAGGCGUAAA | |
| | AAAGGAGGGUGGUUCGGCAAACAUCGCGGCCAGGGAGGG | |
| | AGCAACCCCAAGUUUGAAAAUAUCGCCGAAGGGCUACGA | |
| | GCUUUGCUCGCGAGGUCCCAUGUGGAACGAACUACAGAC | |
| | GAGGGCACCUGGGUGGCUGGUGUCUUCGUUUAUGGCGGG | |
| | AGCAAGACCUCCCUGUAUAAUCUAAGGCGGGGCACAGCC | |
| | CUGGCCAUACCGCAGUGUCGCCUGACACCCCUGUCUCGCC | |
| | UGCCUUUUGGCAUGGCGCCAGGGCCAGGACCACAACCUG | |
| | GGCCCCUGCGCGAAAGUAUUGUGUGUUACUUCAUGGUCU | |
| | UCCUGCAGACACAUAUUUUCGCAGAAGUCCUAAAGGAUG | |
| | CAAUAAAGGAUCUCGUAAUGACGAAGCCCGCCCCAACGU | |
| | GUAAUAUUAGGGUUACGGUCUGUAGUUUCGAUGACGGGG | |
| | UAGAUCUCCCCCCCUGGUUCCCACCUAUGGUCGAGGGUGC | |
| | CGCUGCGGAGGGGGACGAUGGCGACGACGGCGAUGAAGG | |
| | CGGGGAUGGCGACGAGGGGGAGGAGGGACAGGAA | |
| 3′ UTR | UGAUAAUAGGCUGGAGCCUCGGUGGCCAUGCUUCUUGCC | 3 |
| | CCUUGGGCCUCCCCCCAGCCCCUCCUCCCCUUCCUGCACC | |
| | CGUACCCCCGUGGUCUUUGAAUAAAGUCUGAGUGGGCGG | |
| | C | |
| Corresponding | MSDEGPGTGPGNGLGEKGDTSGPEGSGGSGPQRRGGDNHGR | 4 |
| amino acid | GRGRGRGRGGGRPGAPGGSGSGPRHRDGVRRPQKRPSCIGCK | |
| sequence | GTHGGTGGGAGAGGARGRGGSGGRGRGGSGGRRGRGRERA | |
| | RGGSRERARGRGRGRGEKRPRSPSSQSSSSGSPPRRPPPGRRPF | |
| | FHPVGEADYFEYHQEGGPDGEPDVPPGAIEQGPADDPGEGPST | |
| | GPRGQGDGGRRKKGGWFGKHRGQGGSNPKFENIAEGLRALL | |
| | ARSHVERTTDEGTWVAGVFVYGGSKTSLYNLRRGTALAIPQC | |
| | RLTPLSRLPFGMAPGPGPQPGPLRESIVCYFMVFLQTHIFAEVL | |
| | KDAIKDLVMTKPAPTCNIRVTVCSFDDGVDLPPWFPPMVEGA | |
| | AAEGDDGDDGDEGGDGDEGEEGQE | |
| PolyA tail | 100 nt | |

EBNA1_mod_003

| SEQ ID NO: 132 consists of from 5′ end to 3′ end: | | 132 |
|---|---|---|
| 5′ UTR SEQ ID NO: 1, mRNA ORF SEQ ID NO: 6, and | | |
| 3′ UTR SEQ ID NO: 3 | | |
| Chemistry | 1-methylpseudouridine | |
| Cap | 7mG(5′)ppp(5′)NlmpNp | |
| 5′ UTR | GGGAAAUAAGAGAGAAAAGAAGAGUAAGAAGAAAUAUA | 1 |
| | AGAGCCACC | |
| ORF of mRNA | AUGUCAGACGAGGGCCCAGGCACGGGCCCUGGAAACGGA | 6 |
| Construct | CUGGGAGAGAAGGGGGAUACCUCAGGGCCAGAGGGUAGU | |
| (excluding | GGGGGUAGCGGGCCUCAGAGAAGGGGGGGCGACAAUCAC | |
| the stop | GGUCGGGGAAGAGGGAGAGGUAGGGGUAGAGGAGGAGGC | |
| codon) | CGUCCCGGGGCUCCUGGCGGUUCCGGGUCCGGCCCUCGCC | |
| | ACAGAGAUGGCGUGAGGAGACCUCAGAAGCGUCCGUCCU | |
| | GUAUUGGGUGCAAGGGGACCCACGGUGGCACCGGUGGCG | |
| | GAGCUGGGGCAGGAGGUGCUAGAGGAAGAGGCGGUUCAG | |
| | GUGGAAGGGGUCGCGGUGGUUCAGGAGGACGGCGCGGCC | |
| | GGGGGAGAGAGCGGGCAAGAGGCGGCAGCAGGGAGCGGG | |
| | CAAGAGGACGAGGGAGGGGCCGAGGCGAGAAGCGACCUA | |
| | GGUCGCCUAGUUCACAGAGCUCCAGUUCUGGGUCGCCCCC | |
| | CCGGCGGCCGCCUCCUGGGCGAAGACCCUUUUUCCACCCC | |
| | GUGGGGGAGGCUGACUACUUCGAGUACCACCAGGAGGGC | |
| | GGCCCAGACGGAGAGCCCGAUGUUCCGCCUGGGGCCAUU | |
| | GAACAAGGCCCUGCAGAUGACCCAGGGGAAGGACCAUCA | |
| | ACCGGCCCUAGGGGACAGGGCGAUGGGGGGAGACGGAAA | |
| | AAGGGAGGGUGGUUCGGGAAGCACCGCGGCCAGGGGGGG | |
| | UCUAAUCCGAAAUUCGAAAACAUUGCCGAGGGCCUCCGU | |
| | GCUUUGUUGGCUAGAUCACACGUGGAAAGAACCACGGAU | |
| | GAAGGCACGUGGGUGGCGGGCGUCUUCGUGUAUGGUGGG | |
| | AGUAAGACCUCCCUGUAUAACCUCAGGCGUGGCACAGCC | |
| | CUUGCCAUCCCACAGUGCAGGCUCACACCCCUUAGCAGGC | |
| | UUCCCUUUGGCAUGGCUCCUGGUCCCGGCCCCCAGCCCGG | |
| | UCCACUGCGAGAAUCCAUUGUAUGUUACUUCAUGGUUUU | |
| | CUUGCAGACACAUAUCUUCGCCGAGGUGCUGAAAGACGC | |
| | CAUUAAAGACCUGGUGAUGACAAAGCCUGCCCCCACGUG | |
| | CAAUAUCCGUGUGACCGUCUGCUCCUUUGAUGACGGAGU | |
| | CGACCUGCCUCCCUGGUUUCCCCCAAUGGUCGAGGGCGCU | |
| | GCGGCGGAAGGGGACGACGGCGAUGAUGGUGACGAGGGC | |
| | GGUGAUGGCGACGAAGGUGAAGAGGGUCAGGAG | |
| 3′ UTR | UGAUAAUAGGCUGGAGCCUCGGUGGCCAUGCUUCUUGCC | 3 |
| | CCUUGGGCCUCCCCCCAGCCCCUCCUCCCCUUCCUGCACC | |
| | CGUACCCCCGUGGUCUUUGAAUAAAGUCUGAGUGGGCGG | |
| | C | |
| Corresponding | MSDEGPGTGPGNGLGEKGDTSGPEGSGGSGPQRRGGDNHGR | 4 |
| amino acid | GRGRGRGRGGGRPGAPGGSGSGPRHRDGVRRPQKRPSCIGCK | |
| sequence | GTHGGTGGGAGAGGARGRGGSGGRGRGGSGGRRGRGRERA | |
| | RGGSRERARGRGRGRGEKRPRSPSSQSSSSGSPPRRPPPGRRPF | |
| | FHPVGEADYFEYHQEGGPDGEPDVPPGAIEQGPADDPGEGPST | |
| | GPRGQGDGGRRKKGGWFGKHRGQGGSNPKFENIAEGLRALL | |
| | ARSHVERTTDEGTWVAGVFVYGGSKTSLYNLRRGTALAIPQC | |
| | RLTPLSRLPFGMAPGPGPQPGPLRESIVCYFMVFLQTHIFAEVL | |
| | KDAIKDLVMTKPAPTCNIRVTVCSFDDGVDLPPWFPPMVEGA | |
| | AAEGDDGDDGDEGGDGDEGEEGQE | |
| PolyA tail | 100 nt | |

EBNA1_mod_004

| SEQ ID NO: 133 consists of from 5′ end to 3′ end: | | 133 |
|---|---|---|
| 5′ UTR SEQ ID NO: 1, mRNA ORF SEQ ID NO: 7, and | | |
| 3′ UTR SEQ ID NO: 3 | | |
| Chemistry | 1-methylpseudouridine | |
| Cap | 7mG(5′)ppp(5′)NlmpNp | |
| 5′ UTR | GGGAAAUAAGAGAGAAAAGAAGAGUAAGAAGAAAUAUA | 1 |
| | AGAGCCACC | |
| ORF of mRNA | AUGAGCGACGAGGGUCCAGGCACAGGCCCGGGGAACGGG | 7 |
| Construct | UUGGGAGAAAAAGGGGACACUUCCGGUCCAGAAGGCUCC | |
| (excluding | GGGGGGAGCGGACCUCAGAGAAGAGGUGGUGAUAAUCAC | |
| the stop | GGGAGAGGGAGAGGGCGGGGCAGGGGACGUGGGGGCGGU | |
| codon) | AGACCUGGGGCGCCGGGGGGUUCCGGCUCCGGACCACGG | |
| | CAUAGGGAUGGUGUGCGAAGGCCGCAGAAGCGGCCGUCU | |
| | UGUAUAGGCUGCAAAGGCACUCACGGUGGUACCGGGGGG | |
| | GGAGCAGGAGCAGGAGGCGCUCGAGGUCGGGGCGGGUCC | |
| | GGCGGCAGAGGCCGCGGUGGUUCUGGGGGAAGGAGGGGA | |
| | AGAGGGAGAGAACGCGCCCGCGGAGGCUCUCGCGAACGG | |
| | GCCAGAGGGCGGGGGAGGGGGCGCGGGGAGAAAAGGCCC | |
| | AGGUCGCCAAGUAGUCAGUCCUCCAGUAGCGGCAGCCCA | |
| | CCCCGCAGACCUCCUCCAGGACGACGACCUUUCUUUCAUC | |
| | CCGUCGGCGAGGCCGAUUACUUUGAGUACCAUCAGGAAG | |
| | GGGGGCCUGAUGGAGAACCGGAUGUUCCUCCUGGUGCUA | |
| | UCGAACAGGGCCCCGCCGACGAUCCAGGCGAGGGCCCCAG | |
| | UACGGGCCCUAGAGGCCAGGGAGAUGGAGGUAGAAGGAA | |
| | GAAGGGGGGAUGGUUUGGCAAGCACAGAGGGCAGGGAGG | |
| | UAGUAAUCCCAAAUUUGAGAAUAUUGCCGAGGGUCUGCG | |
| | GGCACUUCUGGCCCGGUCUCAUGUUGAGAGAACGACUGA | |
| | UGAGGGAACAUGGGUGGCUGGCGUCUUUGUGUAUGGCGG | |
| | UAGUAAAACCAGCCUCUACAAUUUACGGCGUGGGACAGC | |
| | GCUAGCUAUUCCGCAAUGCCGGCUGACCCCUUUGUCUAG | |
| | GCUGCCCUUUGGUAUGGCCCCCGGCCCCGGCCCACAGCCU | |
| | GGGCCUUUGCGGGAAAGCAUCGUCUGCUACUUUAUGGUG | |
| | UUCCUCCAGACCCACAUCUUUGCAGAGGUGCUUAAGGAC | |
| | GCCAUAAAGGACCUGGUUAUGACCAAACCCGCCCCUACCU | |
| | GCAAUAUCCGCGUCACGGUGUGCUCCUUCGACGACGGGG | |
| | UUGACUUGCCUCCAUGGUUCCCACCCAUGGUAGAGGGCG | |
| | CUGCUGCCGAGGGGGAUGAUGGAGACGACGGAGACGAGG | |
| | GCGGCGAUGGCGAUGAAGGCGAAGAAGGCCAGGAA | |
| 3′ UTR | UGAUAAUAGGCUGGAGCCUCGGUGGCCAUGCUUCUUGCC | 3 |
| | CCUUGGGCCUCCCCCCAGCCCCUCCUCCCCUUCCUGCACC | |
| | CGUACCCCCGUGGUCUUUGAAUAAAGUCUGAGUGGGCGG | |
| Corresponding | MSDEGPGTGPGNGLGEKGDTSGPEGSGGSGPQRRGGDNHGR | 4 |
| amino acid | GRGRGRGRGGGRPGAPGGSGSGPRHRDGVRRPQKRPSCIGCK | |
| sequence | GTHGGTGGGAGAGGARGRGGSGGRGRGGSGGRRGRGRERA | |
| | RGGSRERARGRGRGRGEKRPRSPSSQSSSSGSPPRRPPPGRRPF | |
| | FHPVGEADYFEYHQEGGPDGEPDVPPGAIEQGPADDPGEGPST | |
| | GPRGQGDGGRRKKGGWFGKHRGQGGSNPKFENIAEGLRALL | |
| | ARSHVERTTDEGTWVAGVFVYGGSKTSLYNLRRGTALAIPQC | |
| | RLTPLSRLPFGMAPGPGPQPGPLRESIVCYFMVFLQTHIFAEVL | |
| | KDAIKDLVMTKPAPTCNIRVTVCSFDDGVDLPPWFPPMVEGA | |
| | AAEGDDGDDGDEGGDGDEGEEGQE | |
| PolyA tail | 100 nt | |

EBNA1_mod_005

| SEQ ID NO: 134 consists of from 5′ end to 3′ end: | | 134 |
|---|---|---|
| 5′ UTR SEQ ID NO: 1, mRNA ORF SEQ ID NO: 8, and | | |
| 3′ UTR SEQ ID NO: 3 | | |
| Chemistry | 1-methylpseudouridine | |
| Cap | 7mG(5′)ppp(5′)NlmpNp | |
| 5′ UTR | GGGAAAUAAGAGAGAAAAGAAGAGUAAGAAGAAAUAUA | 1 |
| | AGAGCCACC | |
| ORF of mRNA | AUGUCUGACGAAGGCCCGGGCACAGGCCCAGGCAACGGA | 8 |
| Construct | UUGGGCGAAAAAGGUGAUACAAGCGGGCCAGAAGGGAGC | |
| (excluding | GGGGGCUCUGGGCCCCAGAGACGGGGGGGUGACAAUCAC | |
| the stop | GGCCGAGGAAGGGGAAGGGGCAGGGGAAGAGGCGGAGGA | |
| codon) | CGGCCUGGCGCUCCUGGAGGCUCUGGCUCAGGUCCAAGA | |
| | CAUAGGGAUGGGGUCAGAAGACCACAGAAGAGACCUAGC | |
| | UGUAUUGGAUGCAAGGGUACACACGGUGGCACGGGCGGC | |
| | GGUGCUGGCGCUGGGGGCGCGAGAGGACGUGGAGGUUCA | |
| | GGCGGGAGAGGUCGAGGAGGCUCUGGAGGCCGCAGGGGG | |
| | AGAGGACGAGAGAGGGCCCGGGGGGGGUCCCGGGAAAGA | |
| | GCUAGAGGGAGGGGACGCGGGCGGGGGGAAAAGCGGCCU | |
| | CGCUCUCCUUCUUCUCAAUCUUCCUCCUCUGGUUCUCCGC | |
| | CCCGACGCCCCCCACCGGGCAGGAGGCCAUUUUUUCACCC | |
| | UGUCGGCGAGGCAGACUACUUCGAGUACCACCAAGAAGG | |
| | AGGCCCAGACGGCGAGCCUGAUGUGCCGCCAGGUGCCAU | |
| | CGAGCAGGGGCCAGCUGAUGACCCGGGGGAGGGACCUAG | |
| | CACGGGGCCCCGCGGUCAGGGCGACGGAGGGAGGAGAAA | |
| | AAAAGGUGGGUGGUUUGGCAAGCAUAGAGGGCAGGGUGG | |
| | CUCAAACCCAAAGUUUGAAAACAUCGCAGAAGGUCUUCG | |
| | GGCUCUGCUGGCCCGCUCUCAUGUAGAGCGCACUACUGA | |
| | CGAAGGCACCUGGGUGGCCGGGGUGUUCGUGUACGGAGG | |
| | AUCUAAGACCAGUCUGUACAACCUCCGGAGGGGGACAGC | |
| | UCUCGCUAUCCCCCAGUGUAGGCUCACCCCUUUGAGUCGC | |
| | CUUCCGUUCGGAAUGGCUCCUGGCCCGGGCCCCCAGCCCG | |
| | GGCCACUAAGAGAGAGCAUCGUAUGCUACUUUAUGGUAU | |
| | UUUUGCAAACCCACAUCUUCGCUGAAGUGCUUAAGGACG | |
| | CCAUCAAAGACCUGGUGAUGACAAAACCAGCUCCAACAU | |
| | GCAAUAUUAGGGUAACCGUAUGCUCCUUCGAUGAUGGCG | |
| | UCGACCUUCCACCUUGGUUCCCCCCAAUGGUGGAGGGAG | |
| | CCGCAGCAGAAGGAGACGAUGGUGAUGAUGGAGACGAAG | |
| | GCGGGGAUGGCGACGAAGGAGAGGAGGGACAGGAA | |
| 3′ UTR | UGAUAAUAGGCUGGAGCCUCGGUGGCCAUGCUUCUUGCC | 3 |
| | CCUUGGGCCUCCCCCCAGCCCCUCCUCCCCUUCCUGCACC | |
| | CGUACCCCCGUGGUCUUUGAAUAAAGUCUGAGUGGGCGG | |
| | C | |
| Corresponding | MSDEGPGTGPGNGLGEKGDTSGPEGSGGSGPQRRGGDNHGR | 4 |
| amino acid | GRGRGRGRGGGRPGAPGGSGSGPRHRDGVRRPQKRPSCIGCK | |
| sequence | GTHGGTGGGAGAGGARGRGGSGGRGRGGSGGRRGRGRERA | |
| | RGGSRERARGRGRGRGEKRPRSPSSQSSSSGSPPRRPPPGRRPF | |
| | FHPVGEADYFEYHQEGGPDGEPDVPPGAIEQGPADDPGEGPST | |
| | GPRGQGDGGRRKKGGWFGKHRGQGGSNPKFENIAEGLRALL | |
| | ARSHVERTTDEGTWVAGVFVYGGSKTSLYNLRRGTALAIPQC | |
| | RLTPLSRLPFGMAPGPGPQPGPLRESIVCYFMVFLQTHIFAEVL | |
| | KDAIKDLVMTKPAPTCNIRVTVCSFDDGVDLPPWFPPMVEGA | |
| | AAEGDDGDDGDEGGDGDEGEEGQE | |
| PolyA tail | 100 nt | |

EBNA1_trunc_001

| SEQ ID NO: 135 consists of from 5′ end to 3′ end: | | 135 |
|---|---|---|
| 5′ UTR SEQ ID NO: 1, mRNA ORF SEQ ID NO: 9, and | | |
| 3′ UTR SEQ ID NO: 3 | | |
| Chemistry | 1-methylpseudouridine | |
| Cap | 7mG(5′)ppp(5′)NlmpNp | |
| 5′ UTR | GGGAAAUAAGAGAGAAAAGAAGAGUAAGAAGAAAUAUA | 1 |
| | AGAGCCACC | |
| ORF of mRNA | AUGGGCAGAAGACCCUUCUUUCACCCCGUGGGAGAAGCC | 9 |
| Construct | GACUAUUUCGAGUACCACCAGGAGGGCGGUCCUGACGGC | |
| (excluding | GAGCCCGACGUGCCUCCAGGCGCCAUCGAACAGGGCCCCG | |
| the stop | CUGACGAUCCUGGCGAGGGGCCUUCCACAGGCCCUCGCGG | |
| codon) | CCAGGGAGAUGGGGGAAGGCGGAAGAAGGGGGGCUGGUU | |
| | UGGCAAGCAUAGGGGCCAGGGCGGCUCCAAUCCCAAGUU | |
| | CGAGAAUAUCGCCGAGGGGCUCCGGGCUCUGCUGGCCCG | |
| | GUCGCACGUCGAACGUACCACUGACGAGGGGACGUGGGU | |
| | GGCCGGCGUCUUUGUGUACGGAGGAUCCAAGACCUCCCU | |
| | GUACAACCUGAGAAGGGGGACCGCCCUUGCCAUCCCUCA | |
| | GUGCAGACUCACCCCCCUGAGCAGGCUCCCCUUUGGGAUG | |
| | GCUCCUGGGCCAGGCCCCCAGCCCGGGCCCCUCAGGGAAA | |
| | GCAUCGUGUGUUACUUUAUGGUGUUUCUGCAGACACACA | |
| | UUUUUGCAGAAGUUCUGAAAGAUGCAAUCAAGGAUCUGG | |
| | UGAUGACCAAGCCUGCACCUACGUGCAAUAUCAGGGUGA | |
| | CAGUAUGCUCCUUCGACGACGGUGUGGACCUCCCCCCCUG | |
| | GUUCCCACCCAUGGUCGAGGGGGCCGCCGCCGAGGGAGA | |
| | CGAUGGCGACGACGGUGAUGAGGGGGGAGACGGAGAUGA | |
| | AGGCGAGGAGGGGCAGGAG | |
| 3′ UTR | UGAUAAUAGGCUGGAGCCUCGGUGGCCAUGCUUCUUGCC | 3 |
| | CCUUGGGCCUCCCCCCAGCCCCUCCUCCCCUUCCUGCACC | |
| | CGUACCCCCGUGGUCUUUGAAUAAAGUCUGAGUGGGCGG | |
| | C | |
| Corresponding | MGRRPFFHPVGEADYFEYHQEGGPDGEPDVPPGAIEQGPADD | 10 |
| amino acid | PGEGPSTGPRGQGDGGRRKKGGWFGKHRGQGGSNPKFENIA | |
| sequence | EGLRALLARSHVERTTDEGTWVAGVFVYGGSKTSLYNLRRG | |
| | TALAIPQCRLTPLSRLPFGMAPGPGPQPGPLRESIVCYFMVFLQ | |
| | THIFAEVLKDAIKDLVMTKPAPTCNIRVTVCSFDDGVDLPPWF | |
| | PPMVEGAAAEGDDGDDGDEGGDGDEGEEGQE | |
| PolyA tail | 100 nt | |

EBNA1_trunc_002

| SEQ ID NO: 136 consists of from 5′ end to 3′ end: | | 136 |
|---|---|---|
| 5′ UTR SEQ ID NO: 1, mRNA ORF SEQ ID NO: 11, and | | |
| 3′ UTR SEQ ID NO: 3 | | |
| Chemistry | 1-methylpseudouridine | |
| Cap | 7mG(5′)ppp(5′)NlmpNp | |
| 5′ UTR | GGGAAAUAAGAGAGAAAAGAAGAGUAAGAAGAAAUAUA | 1 |
| | AGAGCCACC | |
| ORF of mRNA | AUGGGACGGAGACCAUUCUUCCACCCCGUGGGAGAAGCC | 11 |
| Construct | GACUACUUCGAGUACCACCAGGAGGGCGGUCCAGACGGC | |
| (excluding | GAACCCGACGUCCCUCCUGGAGCCAUCGAGCAGGGCCCCG | |
| the stop | CCGACGACCCUGGCGAGGGCCCUAGCACCGGACCUAGAGG | |
| codon) | ACAAGGCGACGGCGGGAGGAGAAAGAAGGGGGGCUGGUU | |
| | CGGGAAGCACCGCGGGCAAGGCGGCAGCAACCCAAAGUU | |
| | CGAGAACAUCGCCGAGGGGUUGCGGGCCCUGCUCGCCCG | |
| | UUCCCACGUGGAGCGGACAACCGACGAGGGAACCUGGGU | |
| | UGCCGGGGUAUUUGUGUACGGCGGCAGUAAGACCAGCCU | |
| | GUAUAACCUCAGAAGAGGAACAGCCCUGGCCAUCCCACA | |
| | GUGCAGGCUGACACCCCUCUCCCGGCUGCCAUUUGGAAU | |
| | GGCACCCGGGCCUGGACCCCAGCCUGGCCCACUGCGCGAG | |
| | UCUAUCGUGUGUUACUUUAUGGUCUUCCUGCAAACCCAC | |
| | AUCUUCGCCGAGGUUUUAAAGGAUGCCAUCAAAGACCUC | |
| | GUGAUGACAAAGCCCGCUCCCACCUGCAAUAUCAGAGUG | |
| | ACCGUAUGCAGCUUUGACGACGGCGUGGACCUGCCUCCC | |
| | UGGUUCCCUCCUAUGGUGGAGGGCGCCGCCGCAGAAGGG | |
| | GACGACGGUGACGAUGGCGAUGAGGGAGGGGAUGGAGAC | |
| | GAAGGCGAGGAGGGCCAGGAG | |
| 3′ UTR | UGAUAAUAGGCUGGAGCCUCGGUGGCCAUGCUUCUUGCC | 3 |
| | CCUUGGGCCUCCCCCCAGCCCCUCCUCCCCUUCCUGCACC | |
| | CGUACCCCCGUGGUCUUUGAAUAAAGUCUGAGUGGGCGG | |
| | C | |
| Corresponding | MGRRPFFHPVGEADYFEYHQEGGPDGEPDVPPGAIEQGPADD | 10 |
| amino acid | PGEGPSTGPRGQGDGGRRKKGGWFGKHRGQGGSNPKFENIA | |
| sequence | EGLRALLARSHVERTTDEGTWVAGVFVYGGSKTSLYNLRRG | |
| | TALAIPQCRLTPLSRLPFGMAPGPGPQPGPLRESIVCYFMVFLQ | |
| | THIFAEVLKDAIKDLVMTKPAPTCNIRVTVCSFDDGVDLPPWF | |
| | PPMVEGAAAEGDDGDDGDEGGDGDEGEEGQE | |
| PolyA tail | 100 nt | |

EBNA1_trunc_003

| SEQ ID NO: 137 consists of from 5′ end to 3′ end: | | 137 |
|---|---|---|
| 5′ UTR SEQ ID NO: 1, mRNA ORF SEQ ID NO: 12, and | | |
| 3′ UTR SEQ ID NO: 3 | | |
| Chemistry | 1-methylpseudouridine | |
| Cap | 7mG(5′)ppp(5′)NlmpNp | |
| 5′ UTR | GGGAAAUAAGAGAGAAAAGAAGAGUAAGAAGAAAUAUA | 1 |
| | AGAGCCACC | |
| ORF of mRNA | AUGGGCCGCAGACCCUUCUUUCACCCCGUGGGAGAGGCC | 12 |
| Construct | GACUAUUUUGAGUACCACCAGGAGGGCGGGCCCGACGGC | |
| (excluding | GAACCUGACGUGCCACCUGGCGCCAUUGAACAAGGCCCA | |
| the stop | GCCGACGACCCUGGGGAGGGCCCUAGCACAGGGCCCAGG | |
| codon) | GGCCAGGGAGACGGGGGUAGGCGUAAGAAGGGAGGCUGG | |
| | UUCGGUAAGCACCGCGGCCAGGGUGGCAGCAACCCUAAA | |
| | UUCGAGAAUAUUGCCGAAGGUCUGCGAGCCCUCUUGGCC | |
| | AGAAGCCACGUGGAACGCACUACUGAUGAGGGCACCUGG | |
| | GUCGCCGGAGUGUUCGUGUACGGCGGAAGCAAAACCAGU | |
| | CUGUACAACCUGCGCCGGGGAACCGCUCUUGCCAUCCCCC | |
| | AGUGUCGCCUGACCCCAUUGUCCAGACUGCCAUUUGGCA | |
| | UGGCCCCCGGCCCCGGCCCCCAGCCCGGCCCCCUGAGGGA | |
| | GAGCAUCGUGUGCUACUUCAUGGUGUUCCUGCAGACCCA | |
| | CAUAUUCGCUGAGGUGCUGAAGGACGCCAUUAAGGACCU | |
| | GGUGAUGACCAAGCCCGCCCCUACCUGCAACAUCCGCGUC | |
| | ACCGUCUGUAGUUUCGAUGACGGCGUGGAUCUCCCACCA | |
| | UGGUUUCCUCCAAUGGUGGAGGGCGCUGCUGCCGAGGGG | |
| | GACGACGGAGACGACGGAGACGAGGGCGGGGACGGGGAC | |
| | GAAGGCGAAGAGGGGCAAGAG | |
| 3′ UTR | UGAUAAUAGGCUGGAGCCUCGGUGGCCAUGCUUCUUGCC | 3 |
| | CCUUGGGCCUCCCCCCAGCCCCUCCUCCCCUUCCUGCACC | |
| | CGUACCCCCGUGGUCUUUGAAUAAAGUCUGAGUGGGCGG | |
| | C | |
| Corresponding | MGRRPFFHPVGEADYFEYHQEGGPDGEPDVPPGAIEQGPADD | 10 |
| amino acid | PGEGPSTGPRGQGDGGRRKKGGWFGKHRGQGGSNPKFENIA | |
| sequence | EGLRALLARSHVERTTDEGTWVAGVFVYGGSKTSLYNLRRG | |
| | TALAIPQCRLTPLSRLPFGMAPGPGPQPGPLRESIVCYFMVFLQ | |
| | THIFAEVLKDAIKDLVMTKPAPTCNIRVTVCSFDDGVDLPPWF | |
| | PPMVEGAAAEGDDGDDGDEGGDGDEGEEGQE | |
| PolyA tail | 100 nt | |

EBNA1_trunc_004

| SEQ ID NO: 138 consists of from 5′ end to 3′ end: | | 138 |
|---|---|---|
| 5′ UTR SEQ ID NO: 1, mRNA ORF SEQ ID NO: 13, and | | |
| 3′ UTR SEQ ID NO: 3 | | |
| Chemistry | 1-methylpseudouridine | |
| Cap | 7mG(5′)ppp(5′)NlmpNp | |
| 5′ UTR | GGGAAAUAAGAGAGAAAAGAAGAGUAAGAAGAAAUAUA | 1 |
| | AGAGCCACC | |
| ORF of mRNA | AUGGGACGGAGACCUUUCUUUCACCCCGUAGGUGAAGCC | 13 |
| Construct | GACUACUUUGAAUACCACCAGGAGGGCGGCCCAGACGGC | |
| (excluding | GAGCCCGACGUUCCCCCCGGGGCUAUCGAGCAGGGGCCUG | |
| the stop | CGGACGACCCAGGAGAGGGACCUAGCACUGGACCCCGAG | |
| codon) | GUCAGGGCGAUGGGGGGCGAAGAAAGAAGGGCGGCUGGU | |
| | UCGGCAAACAUAGGGGCCAGGGCGGGUCUAACCCAAAGU | |
| | UCGAGAACAUAGCCGAGGGCCUGAGAGCCCUGCUGGCAA | |
| | GAAGCCACGUGGAGCGAACCACAGAUGAAGGCACCUGGG | |
| | UGGCCGGCGUGUUCGUGUACGGGGGCAGCAAGACCUCCC | |
| | UGUAUAACCUCAGAAGAGGGACCGCCCUGGCCAUCCCCCA | |
| | GUGCCGACUGACCCCCCUGAGCAGGCUGCCCUUCGGAAUG | |
| | GCCCCUGGUCCCGGUCCCCAACCGGGCCCGCUUCGGGAGU | |
| | CCAUAGUGUGCUACUUCAUGGUGUUCCUGCAGACACACA | |
| | UCUUCGCCGAGGUGCUGAAGGAUGCAAUCAAGGACCUGG | |
| | UGAUGACCAAGCCAGCUCCCACCUGCAACAUCCGGGUGAC | |
| | CGUGUGCAGCUUUGAUGACGGCGUGGACCUGCCACCCUG | |
| | GUUCCCGCCUAUGGUGGAGGGCGCUGCAGCCGAGGGCGA | |
| | CGACGGGGACGACGGCGACGAGGGCGGAGAUGGCGACGA | |
| | GGGCGAGGAGGGCCAGGAG | |
| 3′ UTR | UGAUAAUAGGCUGGAGCCUCGGUGGCCAUGCUUCUUGCC | 3 |
| | CCUUGGGCCUCCCCCCAGCCCCUCCUCCCCUUCCUGCACC | |
| | CGUACCCCCGUGGUCUUUGAAUAAAGUCUGAGUGGGCGG | |
| | C | |
| Corresponding | MGRRPFFHPVGEADYFEYHQEGGPDGEPDVPPGAIEQGPADD | 10 |
| amino acid | PGEGPSTGPRGQGDGGRRKKGGWFGKHRGQGGSNPKFENIA | |
| sequence | EGLRALLARSHVERTTDEGTWVAGVFVYGGSKTSLYNLRRG | |
| | TALAIPQCRLTPLSRLPFGMAPGPGPQPGPLRESIVCYFMVFLQ | |
| | THIFAEVLKDAIKDLVMTKPAPTCNIRVTVCSFDDGVDLPPWF | |
| | PPMVEGAAAEGDDGDDGDEGGDGDEGEEGQE | |
| PolyA tail | 100 nt | |

EBNA1_trunc_005

| SEQ ID NO: 139 consists of from 5′ end to 3′ end: | | 139 |
|---|---|---|
| 5′ UTR SEQ ID NO: 1, mRNA ORF SEQ ID NO: 14, and | | |
| 3′ UTR SEQ ID NO: 3 | | |
| Chemistry | 1-methylpseudouridine | |
| Cap | 7mG(5′)ppp(5′)NlmpNp | |
| 5′ UTR | GGGAAAUAAGAGAGAAAAGAAGAGUAAGAAGAAAUAUA | 1 |
| | AGAGCCACC | |
| ORF of mRNA | AUGGGCAGACGGCCCUUCUUCCACCCCGUGGGCGAAGCA | 14 |
| Construct | GACUAUUUUGAGUAUCACCAGGAGGGGGGCCCCGACGGC | |
| (excluding | GAGCCAGACGUCCCACCUGGUGCAAUCGAGCAAGGUCCC | |
| the stop | GCCGACGACCCUGGGGAGGGCCCCAGCACCGGCCCCAGAG | |
| codon) | GCCAGGGGGACGGGGGCAGGAGAAAAAAGGGUGGCUGGU | |
| | UCGGCAAGCACAGAGGGCAGGGGGGGAGCAACCCAAAGU | |
| | UCGAGAACAUCGCCGAGGGCUUGAGAGCACUGCUGGCCA | |
| | GAAGCCACGUGGAGAGAACCACCGAUGAGGGAACCUGGG | |
| | UUGCUGGCGUGUUCGUCUACGGCGGCAGCAAGACCAGCC | |
| | UGUACAACCUUAGAAGAGGCACCGCCCUGGCCAUCCCCCA | |
| | GUGCCGCCUGACACCGCUGAGCAGACUCCCCUUCGGCAUG | |
| | GCUCCUGGCCCCGGCCCCCAGCCCGGGCCCCUGAGAGAGA | |
| | GCAUCGUGUGCUACUUCAUGGUGUUUCUUCAGACGCACA | |
| | UCUUCGCUGAGGUCCUGAAAGACGCCAUUAAGGACCUGG | |
| | UGAUGACAAAACCAGCUCCGACCUGCAACAUCAGGGUCA | |
| | CUGUCUGUAGCUUCGACGAUGGCGUGGAUCUCCCUCCCU | |
| | GGUUCCCCCCAAUGGUGGAGGGCGCUGCCGCUGAGGGGG | |
| | ACGACGGCGACGACGGGGAUGAAGGCGGCGACGGCGACG | |
| | AGGGGGAAGAGGGCCAGGAG | |
| 3′UTR | UGAUAAUAGGCUGGAGCCUCGGUGGCCAUGCUUCUUGCC | 3 |
| | CCUUGGGCCUCCCCCCAGCCCCUCCUCCCCUUCCUGCACC | |
| | CGUACCCCCGUGGUCUUUGAAUAAAGUCUGAGUGGGCGG | |
| | C | |
| Corresponding | MGRRPFFHPVGEADYFEYHQEGGPDGEPDVPPGAIEQGPADD | 10 |
| amino acid | PGEGPSTGPRGQGDGGRRKKGGWFGKHRGQGGSNPKFENIA | |
| sequence | EGLRALLARSHVERTTDEGTWVAGVFVYGGSKTSLYNLRRG | |
| | TALAIPQCRLTPLSRLPFGMAPGPGPQPGPLRESIVCYFMVFLQ | |
| | THIFAEVLKDAIKDLVMTKPAPTCNIRVTVCSFDDGVDLPPWF | |
| | PPMVEGAAAEGDDGDDGDEGGDGDEGEEGQE | |
| PolyA tail | 100 nt | |

LMP1_001

| SEQ ID NO: 140 consists of from 5′ end to 3′ end: | | 140 |
|---|---|---|
| 5′ UTR SEQ ID NO: 1, mRNA ORF SEQ ID NO: 15, and | | |
| 3′ UTR SEQ ID NO: 3 | | |
| Chemistry | 1-methylpseudouridine | |
| Cap | 7mG(5′)ppp(5′)NlmpNp | |
| 5′ UTR | GGGAAAUAAGAGAGAAAAGAAGAGUAAGAAGAAAUAUA | 1 |
| | AGAGCCACC | |
| ORF of mRNA | AUGGAGCACGACCUGGAGAGGGGGCCACCAGGCCCCAGG | 15 |
| Construct | CGACCCCCAAGAGGACCACCACUGAGCUCCAGCCUGGGAC | |
| (excluding | UGGCCCUCCUGCUGUUGCUCCUCGCUUUACUGUUUUGGC | |
| the stop | UGUAUAUAGUCAUGUCUGACUGGACAGGCGGGGCAUUAU | |
| codon) | UGGUGCUCUACAGCUUUGCACUGAUGCUCAUUAUCAUUA | |
| | UUCUGAUUAUCUUUAUUUUUAGACGGGACUUGCUCUGUC | |
| | CAUUAGGCGCGCUGUGUAUUUUGCUGCUGAUGAUCACAC | |
| | UGCUGCUGAUUGCGCUGUGGAACCUCCACGGUCAGGCCC | |
| | UUUUUCUCGGCAUCGUGCUGUUUAUCUUUGGGUGCCUCU | |
| | UGGUGCUUGGGAUUUGGAUCUACCUUCUCGAAAUGUUAU | |
| | GGCGGCUCGGCGCUACAAUCUGGCAGCUCCUGGCCUUCU | |
| | UCUUAGCAUUUUUUCUGGAUCUGAUCCUGCUGAUAAUAG | |
| | CCCUGUACCUACAACAGAACUGGUGGACUCUGCUGGUUG | |
| | ACCUGUUAUGGCUGCUCCUGUUCCUCGCCAUUCUCAUUU | |
| | GGAUGUACUACCACGGGCAGCGUCAUUCAGACGAACACC | |
| | ACCACGAUGAUAGCCUGCCGCACCCUCAACAAGCUACGGA | |
| | UGACUCCGGACACGAGUCCGAUAGUAACUCCAACGAGGG | |
| | ACGCCAUCACUUGCUGGUCUCUGGGGCUGGCGACGGGCC | |
| | UCCACUGUGUAGCCAAAAUCUGGGAGCCCCCGGCGGGGG | |
| | CCCUGAUAAUGGGCCUCAGGAUCCUGAUAACACGGAUGA | |
| | UAACGGCCCACAGGAUCCAGAUAAUACCGACGAUAAUGG | |
| | ACCUCAUGAUCCUCUUCCACAGGAUCCCGACAAUACAGA | |
| | UGACAAUGGGCCGCAGGAUCCAGACAAUACUGACGAUAA | |
| | UGGCCCACAUGAUCCCCUGCCACACAGCCCCUCAGACUCA | |
| | GCGGGAAAUGAUGGCGGGCCCCCACAGUUAACCGAGGAA | |
| | GUGGAAAACAAAGGGGGAGAUCAGGGUCCUCCCCUCAUG | |
| | ACAGAUGGCGGGGGCGGCCACAGUCAUGAUAGUGGGCAC | |
| | GGGGGUGGCGAUCCACAUCUCCCCACACUGCUGCUAGGC | |
| | AGCUCCGGUAGCGGGGGAGAUGAUGACGAUCCCCACGGC | |
| | CCUGUGCAGUUGAGCUAUUACGAC | |
| 3′ UTR | UGAUAAUAGGCUGGAGCCUCGGUGGCCAUGCUUCUUGCC | 3 |
| | CCUUGGGCCUCCCCCCAGCCCCUCCUCCCCUUCCUGCACC | |
| | CGUACCCCCGUGGUCUUUGAAUAAAGUCUGAGUGGGCGG | |
| | C | |
| Corresponding | MEHDLERGPPGPRRPPRGPPLSSSLGLALLLLLLALLFWLYIV | 16 |
| amino acid | MSDWTGGALLVLYSFALMLIIIILIIFIFRRDLLCPLGALCILLLM | |
| sequence | ITLLLIALWNLHGQALFLGIVLFIFGCLLVLGIWIYLLEMLWRL | |
| | GATIWQLLAFFLAFFLDLILLIIALYLQQNWWTLLVDLLWLLL | |
| | FLAILIWMYYHGQRHSDEHHHDDSLPHPQQATDDSGHESDSN | |
| | SNEGRHHLLVSGAGDGPPLCSQNLGAPGGGPDNGPQDPDNTD | |
| | DNGPQDPDNTDDNGPHDPLPQDPDNTDDNGPQDPDNTDDNG | |
| | PHDPLPHSPSDSAGNDGGPPQLTEEVENKGGDQGPPLMTDGG | |
| | GGHSHDSGHGGGDPHLPTLLLGSSGSGGDDDDPHGPVQLSYY | |
| | D | |
| PolyA tail | 100 nt | |

LMP1_002

| SEQ ID NO: 141 consists of from 5′ end to 3′ end: | | 141 |
|---|---|---|
| 5′ UTR SEQ ID NO: 1, mRNA ORF SEQ ID NO: 17, and | | |
| 3′ UTR SEQ ID NO: 3 | | |
| Chemistry | 1-methylpseudouridine | |
| Cap | 7mG(5′)ppp(5′)NlmpNp | |
| 5′ UTR | GGGAAAUAAGAGAGAAAAGAAGAGUAAGAAGAAAUAUA | 1 |
| | AGAGCCACC | |
| ORF of mRNA | AUGGAGCACGACCUGGAGCGCGGGCCUCCAGGACCCCGAC | 17 |
| Construct | GGCCGCCCAGGGGGCCACCGCUGUCAUCCAGUCUGGGCCU | |
| (excluding | UGCUCUGUUGCUGUUACUCCUUGCCCUGCUAUUCUGGUU | |
| the stop | GUACAUCGUCAUGAGCGAUUGGACAGGGGGUGCUCUGCU | |
| codon) | GGUGUUGUACAGCUUUGCGCUGAUGUUGAUUAUUAUCAU | |
| | CCUGAUUAUCUUUAUAUUUCGAAGGGACCUCCUUUGUCC | |
| | CCUGGGAGCGCUGUGCAUACUGCUCUUAAUGAUCACGUU | |
| | GCUCCUCAUUGCUUUAUGGAAUCUGCACGGACAGGCUCU | |
| | AUUCCUCGGCAUCGUUUUAUUCAUUUUCGGGUGCCUCCU | |
| | UGUGCUGGGAAUCUGGAUCUAUCUGCUAGAGAUGCUGUG | |
| | GCGGCUCGGCGCCACCAUUUGGCAGCUUCUGGCAUUUUU | |
| | CCUAGCGUUUUUUCUGGAUCUCAUCCUACUUAUUAUCGC | |
| | CUUGUAUUUGCAGCAGAACUGGUGGACUCUCCUGGUGGA | |
| | UCUCCUGUGGCUCCUCCUGUUCCUCGCCAUAUUGAUAUG | |
| | GAUGUACUACCACGGACAGCGCCACAGCGACGAGCACCAC | |
| | CACGAUGAUAGUCUGCCUCACCCUCAACAGGCUACAGAU | |
| | GACUCAGGCCACGAAAGCGAUUCCAACUCAAAUGAAGGC | |
| | CGGCACCACUUGUUGGUGUCCGGAGCCGGCGACGGGCCA | |
| | CCACUCUGCAGCCAGAAUCUGGGCGCUCCCGGCGGAGGUC | |
| | CAGACAAUGGGCCACAGGACCCUGAUAACACGGAUGAUA | |
| | ACGGACCGCAGGAUCCUGACAAUACAGAUGACAACGGCC | |
| | CGCAUGAUCCACUGCCUCAGGAUCCUGAUAAUACUGACG | |
| | AUAACGGACCCCAGGAUCCUGAUAACACCGACGACAACG | |
| | GGCCUCACGAUCCCCUACCCCAUUCCCCAUCUGACUCUGC | |
| | UGGCAACGAUGGCGGCCCACCGCAGCUGACCGAAGAGGU | |
| | AGAAAACAAGGGCGGGGAUCAGGGCCCUCCACUGAUGAC | |
| | AGACGGCGGCGGGGGACACUCCCAUGAUUCGGGCCAUGG | |
| | GGGAGGGGAUCCUCACCUUCCCACACUCUUGCUGGGAAG | |
| | UAGCGGGUCCGGCGGGGACGAUGAUGAUCCCCAUGGUCC | |
| | AGUCCAGUUGUCAUAUUACGAU | |
| 3′ UTR | UGAUAAUAGGCUGGAGCCUCGGUGGCCAUGCUUCUUGCC | 3 |
| | CCUUGGGCCUCCCCCCAGCCCCUCCUCCCCUUCCUGCACC | |
| | CGUACCCCCGUGGUCUUUGAAUAAAGUCUGAGUGGGCGG | |
| | C | |
| Corresponding | MEHDLERGPPGPRRPPRGPPLSSSLGLALLLLLLALLFWLYIV | 16 |
| amino acid | MSDWTGGALLVLYSFALMLIIIILIIFIFRRDLLCPLGALCILLLM | |
| sequence | ITLLLIALWNLHGQALFLGIVLFIFGCLLVLGIWIYLLEMLWRL | |
| | GATIWQLLAFFLAFFLDLILLIIALYLQQNWWTLLVDLLWLLL | |
| | FLAILIWMYYHGQRHSDEHHHDDSLPHPQQATDDSGHESDSN | |
| | SNEGRHHLLVSGAGDGPPLCSQNLGAPGGGPDNGPQDPDNTD | |
| | DNGPQDPDNTDDNGPHDPLPQDPDNTDDNGPQDPDNTDDNG | |
| | PHDPLPHSPSDSAGNDGGPPQLTEEVENKGGDQGPPLMTDGG | |
| | GGHSHDSGHGGGDPHLPTLLLGSSGSGGDDDDPHGPVQLSYY | |
| | D | |
| PolyA tail | 100 nt | |

LMP1_003

| SEQ ID NO: 142 consists of from 5′ end to 3′ end: | | 142 |
|---|---|---|
| 5′ UTR SEQ ID NO: 1, mRNA ORF SEQ ID NO: 18, and | | |
| 3′ UTR SEQ ID NO: 3 | | |
| Chemistry | 1-methylpseudouridine | |
| Cap | 7mG(5′)ppp(5′)NlmpNp | |
| 5′ UTR | GGGAAAUAAGAGAGAAAAGAAGAGUAAGAAGAAAUAUA | 1 |
| | AGAGCCACC | |
| ORF of mRNA | AUGGAGCACGACCUUGAGCGGGGUCCACCAGGCCCACGG | 18 |
| Construct | CGCCCUCCGCGCGGGCCUCCUUUGUCAUCCUCCCUGGGAC | |
| (excluding | UGGCACUGCUGCUGUUGCUUCUGGCCCUGCUGUUCUGGC | |
| the stop | UGUACAUCGUUAUGUCUGAUUGGACAGGAGGAGCUCUGC | |
| codon) | UGGUUCUUUACUCUUUCGCGCUGAUGCUGAUCAUCAUCA | |
| | UCUUGAUCAUUUUCAUUUUCAGACGAGACCUCCUUUGUC | |
| | CUCUCGGAGCCCUGUGUAUCCUCCUGCUGAUGAUAACCC | |
| | UUCUGCUGAUUGCUUUGUGGAAUCUGCAUGGGCAAGCUC | |
| | UGUUUCUUGGAAUUGUCUUAUUUAUUUUUGGGUGUCUGC | |
| | UGGUGUUGGGAAUCUGGAUCUAUCUUCUUGAAAUGCUGU | |
| | GGCGGCUGGGCGCCACAAUCUGGCAGCUACUCGCCUUUU | |
| | UCCUAGCUUUCUUUUUGGAUCUGAUUCUGCUGAUUAUUG | |
| | CUCUCUACCUGCAGCAGAAUUGGUGGACCCUCUUAGUCG | |
| | AUCUGCUGUGGCUGUUGCUCUUUCUCGCCAUCCUGAUUU | |
| | GGAUGUACUAUCAUGGGCAGCGCCAUAGUGAUGAACAUC | |
| | AUCACGAUGAUUCCCUGCCACAUCCUCAGCAGGCCACAGA | |
| | UGAUUCAGGCCACGAAUCAGACAGCAAUAGCAAUGAGGG | |
| | CCGCCACCACCUGCUGGUUUCAGGGGCCGGUGACGGCCCU | |
| | CCAUUGUGCAGUCAGAACCUGGGAGCCCCGGGGGGUGGA | |
| | CCUGAUAACGGGCCGCAGGAUCCUGACAAUACUGAUGAC | |
| | AACGGACCCCAGGAUCCAGAUAACACUGACGACAAUGGC | |
| | CCCCAUGACCCCCUACCCCAGGAUCCCGACAAUACAGACG | |
| | ACAACGGACCGCAGGACCCCGACAACACUGAUGAUAAUG | |
| | GGCCACACGAUCCUCUGCCUCACUCUCCAUCAGACUCUGC | |
| | CGGAAAUGACGGUGGACCGCCACAGUUAACUGAAGAAGU | |
| | CGAAAACAAGGGCGGCGAUCAGGGGCCGCCGCUCAUGAC | |
| | AGAUGGCGGGGGAGGUCACAGCCACGAUAGCGGACACGG | |
| | AGGAGGUGACCCUCAUCUGCCUACACUUCUGUUGGGUAG | |
| | CUCUGGGAGUGGGGGGGAUGACGACGACCCUCACGGACC | |
| | UGUUCAGCUCUCAUACUACGAC | |
| 3′ UTR | UGAUAAUAGGCUGGAGCCUCGGUGGCCAUGCUUCUUGCC | 3 |
| | CCUUGGGCCUCCCCCCAGCCCCUCCUCCCCUUCCUGCACC | |
| | CGUACCCCCGUGGUCUUUGAAUAAAGUCUGAGUGGGCGG | |
| | C | |
| Corresponding | MEHDLERGPPGPRRPPRGPPLSSSLGLALLLLLLALLFWLYIV | 16 |
| amino acid | MSDWTGGALLVLYSFALMLIIIILIIFIFRRDLLCPLGALCILLLM | |
| sequence | ITLLLIALWNLHGQALFLGIVLFIFGCLLVLGIWIYLLEMLWRL | |
| | GATIWQLLAFFLAFFLDLILLIIALYLQQNWWTLLVDLLWLLL | |
| | FLAILIWMYYHGQRHSDEHHHDDSLPHPQQATDDSGHESDSN | |
| | SNEGRHHLLVSGAGDGPPLCSQNLGAPGGGPDNGPQDPDNTD | |
| | DNGPQDPDNTDDNGPHDPLPQDPDNTDDNGPQDPDNTDDNG | |
| | PHDPLPHSPSDSAGNDGGPPQLTEEVENKGGDQGPPLMTDGG | |
| | GGHSHDSGHGGGDPHLPTLLLGSSGSGGDDDDPHGPVQLSYY | |
| | D | |
| PolyA tail | 100 nt | |

LMP1_004

| SEQ ID NO: 143 consists of from 5′ end to 3′ end: | | 143 |
|---|---|---|
| 5′ UTR SEQ ID NO: 1, mRNA ORF SEQ ID NO: 19, and | | |
| 3′ UTR SEQ ID NO: 3 | | |
| Chemistry | 1-methylpseudouridine | |
| Cap | 7mG(5′)ppp(5′)NlmpNp | |
| 5′ UTR | GGGAAAUAAGAGAGAAAAGAAGAGUAAGAAGAAAUAUA | 1 |
| | AGAGCCACC | |
| ORF of mRNA | AUGGAACACGAUCUUGAACGGGGGCCGCCGGGACCGAGG | 19 |
| Construct | AGGCCGCCACGGGGGCCCCCCCUGAGCAGUAGCUUGGGGC | |
| (excluding | UUGCGCUGCUUCUCCUGCUGUUGGCCCUCCUGUUUUGGC | |
| the stop | UGUAUAUUGUGAUGUCCGACUGGACCGGCGGCGCCCUGC | |
| codon) | UCGUCCUGUAUAGCUUUGCUUUGAUGCUGAUAAUUAUUA | |
| | UAUUGAUCAUCUUUAUUUUCCGGCGUGAUUUGCUCUGUC | |
| | CUCUUGGUGCCCUUUGUAUCCUGCUGUUAAUGAUCACUC | |
| | UGCUCCUCAUUGCCCUAUGGAACCUCCACGGACAAGCCCU | |
| | GUUUCUUGGCAUCGUUCUCUUUAUAUUCGGAUGCCUCUU | |
| | AGUGCUUGGGAUCUGGAUAUACCUGUUGGAAAUGCUGUG | |
| | GAGGCUUGGAGCCACGAUAUGGCAAUUAUUGGCAUUCUU | |
| | UCUGGCCUUCUUCCUGGAUCUGAUCCUGUUGAUAAUUGC | |
| | UCUGUACCUGCAGCAGAACUGGUGGACACUACUUGUUGA | |
| | CCUGCUCUGGCUACUCCUGUUCCUUGCGAUCCUGAUUUG | |
| | GAUGUACUAUCACGGACAGAGACACUCCGACGAGCAUCA | |
| | UCACGACGAUUCCUUACCACACCCUCAGCAGGCGACAGAU | |
| | GAUUCUGGCCAUGAGAGCGAUUCCAACAGCAACGAGGGC | |
| | CGGCACCAUUUGCUGGUGUCGGGGGCUGGAGACGGGCCU | |
| | CCGUUAUGUAGCCAAAACUUGGGCGCGCCCGGCGGCGGG | |
| | CCCGAUAACGGCCCGCAGGACCCGGACAAUACCGACGAUA | |
| | AUGGGCCUCAAGAUCCCGACAAUACUGAUGACAAUGGAC | |
| | CACACGAUCCUCUGCCACAGGAUCCCGACAACACAGAUGA | |
| | CAAUGGGCCGCAAGACCCCGACAAUACAGACGAUAAUGG | |
| | CCCCCACGACCCACUACCACAUUCUCCCUCUGACAGUGCG | |
| | GGGAAUGAUGGUGGUCCCCCACAACUGACCGAGGAGGUG | |
| | GAGAAUAAGGGGGGGGACCAAGGUCCACCCCUCAUGACU | |
| | GAUGGAGGAGGAGGACACUCGCACGAUUCAGGUCACGGC | |
| | GGGGGGGACCCUCACUUGCCCACUCUGCUGCUGGGCAGC | |
| | AGCGGUUCUGGGGGCGACGAUGAUGAUCCCCACGGCCCG | |
| | GUGCAGCUAAGUUAUUACGAC | |
| 3′ UTR | UGAUAAUAGGCUGGAGCCUCGGUGGCCAUGCUUCUUGCC | 3 |
| | CCUUGGGCCUCCCCCCAGCCCCUCCUCCCCUUCCUGCACC | |
| | CGUACCCCCGUGGUCUUUGAAUAAAGUCUGAGUGGGCGG | |
| | C | |
| Corresponding | MEHDLERGPPGPRRPPRGPPLSSSLGLALLLLLLALLFWLYIV | 16 |
| amino acid | MSDWTGGALLVLYSFALMLIIIILIIFIFRRDLLCPLGALCILLLM | |
| sequence | ITLLLIALWNLHGQALFLGIVLFIFGCLLVLGIWIYLLEMLWRL | |
| | GATIWQLLAFFLAFFLDLILLIIALYLQQNWWTLLVDLLWLLL | |
| | FLAILIWMYYHGQRHSDEHHHDDSLPHPQQATDDSGHESDSN | |
| | SNEGRHHLLVSGAGDGPPLCSQNLGAPGGGPDNGPQDPDNTD | |
| | DNGPQDPDNTDDNGPHDPLPQDPDNTDDNGPQDPDNTDDNG | |
| | PHDPLPHSPSDSAGNDGGPPQLTEEVENKGGDQGPPLMTDGG | |
| | GGHSHDSGHGGGDPHLPTLLLGSSGSGGDDDDPHGPVQLSYY | |
| | D | |
| PolyA tail | 100 nt | |

LMP1_005

| SEQ ID NO: 144 consists of from 5′ end to 3′ end: | | 144 |
|---|---|---|
| 5′ UTR SEQ ID NO: 1, mRNA ORF SEQ ID NO: 20, and | | |
| 3′ UTR SEQ ID NO: 3 | | |
| Chemistry | 1-methylpseudouridine | |
| Cap | 7mG(5′)ppp(5′)NlmpNp | |
| 5′ UTR | GGGAAAUAAGAGAGAAAAGAAGAGUAAGAAGAAAUAUA | 1 |
| | AGAGCCACC | |
| ORF of mRNA | AUGGAGCACGAUUUAGAGAGGGGCCCACCUGGCCCCAGG | 20 |
| Construct | CGCCCACCUAGAGGCCCACCCUUGUCGUCGUCAUUAGGGC | |
| (excluding | UGGCAUUGCUCCUGCUCCUCCUGGCCUUGCUGUUCUGGC | |
| the stop | UUUACAUCGUGAUGAGCGACUGGACUGGCGGGGCCCUGC | |
| codon) | UGGUCCUCUAUAGCUUUGCACUGAUGCUGAUUAUAAUCA | |
| | UAUUGAUCAUCUUCAUCUUCCGACGGGAUUUACUUUGCC | |
| | CCCUGGGGGCAUUAUGUAUUCUAUUGCUGAUGAUAACAC | |
| | UUCUGCUUAUUGCUUUAUGGAAUCUACACGGUCAGGCUC | |
| | UUUUUCUGGGAAUCGUGCUCUUUAUCUUUGGAUGCCUUC | |
| | UGGUACUAGGAAUUUGGAUAUACCUCUUAGAAAUGCUGU | |
| | GGCGGCUCGGCGCAACCAUCUGGCAACUCCUUGCGUUUU | |
| | UUCUCGCGUUUUUCCUCGACCUGAUUCUGCUAAUAAUCG | |
| | CCUUAUACCUUCAGCAGAAUUGGUGGACACUCCUGGUGG | |
| | ACCUGCUGUGGCUCCUGCUAUUCCUUGCAAUCCUCAUUU | |
| | GGAUGUAUUACCAUGGCCAGAGGCACUCUGAUGAGCACC | |
| | ACCACGAUGAUAGUCUACCUCAUCCACAGCAGGCUACGG | |
| | ACGAUUCAGGGCAUGAGUCAGAUUCUAAUUCCAACGAAG | |
| | GAAGACACCAUCUGUUGGUGUCAGGGGCCGGAGACGGCC | |
| | CCCCUCUGUGUAGCCAGAACCUCGGGGCACCAGGGGGAG | |
| | GUCCUGACAAUGGGCCGCAAGACCCUGACAAUACUGAUG | |
| | AUAAUGGCCCCCAAGAUCCUGACAAUACCGAUGACAACG | |
| | GCCCGCACGACCCCCUGCCGCAGGAUCCGGAUAACACCGA | |
| | CGACAAUGGACCCCAGGACCCCGAUAACACGGACGAUAA | |
| | CGGCCCUCACGAUCCCUUACCCCAUUCUCCGUCCGACUCU | |
| | GCAGGGAACGACGGGGGCCCUCCUCAGUUAACCGAAGAG | |
| | GUCGAAAAUAAGGGGGGAGACCAGGGCCCCCCAUUAAUG | |
| | ACAGACGGGGGCGGCGGUCACAGUCACGACUCAGGUCAC | |
| | GGCGGCGGGGACCCCCAUUUGCCUACACUGCUGUUAGGG | |
| | UCUUCUGGCUCAGGCGGGGACGAUGAUGAUCCACACGGU | |
| | CCGGUGCAGCUGUCAUAUUAUGAU | |
| 3′ UTR | UGAUAAUAGGCUGGAGCCUCGGUGGCCAUGCUUCUUGCC | 3 |
| | CCUUGGGCCUCCCCCCAGCCCCUCCUCCCCUUCCUGCACC | |
| | CGUACCCCCGUGGUCUUUGAAUAAAGUCUGAGUGGGCGG | |
| | C | |
| Corresponding | MEHDLERGPPGPRRPPRGPPLSSSLGLALLLLLLALLFWLYIV | 16 |
| amino acid | MSDWTGGALLVLYSFALMLIIIILIIFIFRRDLLCPLGALCILLLM | |
| sequence | ITLLLIALWNLHGQALFLGIVLFIFGCLLVLGIWIYLLEMLWRL | |
| | GATIWQLLAFFLAFFLDLILLIIALYLQQNWWTLLVDLLWLLL | |
| | FLAILIWMYYHGQRHSDEHHHDDSLPHPQQATDDSGHESDSN | |
| | SNEGRHHLLVSGAGDGPPLCSQNLGAPGGGPDNGPQDPDNTD | |
| | DNGPQDPDNTDDNGPHDPLPQDPDNTDDNGPQDPDNTDDNG | |
| | PHDPLPHSPSDSAGNDGGPPQLTEEVENKGGDQGPPLMTDGG | |
| | GGHSHDSGHGGGDPHLPTLLLGSSGSGGDDDDPHGPVQLSYY | |
| | D | |
| PolyA tail | 100 nt | |

LMP2_001

| SEQ ID NO: 145 consists of from 5′ end to 3′ end: | | 145 |
|---|---|---|
| 5′ UTR SEQ ID NO: 1, mRNA ORF SEQ ID NO: 21, and | | |
| 3′ UTR SEQ ID NO: 3 | | |
| Chemistry | 1-methylpseudouridine | |
| Cap | 7mG(5′)ppp(5′)NlmpNp | |
| 5′ UTR | GGGAAAUAAGAGAGAAAAGAAGAGUAAGAAGAAAUAUA | 1 |
| | AGAGCCACC | |
| ORF of mRNA | AUGGGUAGUCUUGAGAUGGUACCAAUGGGCGCAGGUCCA | 21 |
| Construct | CCGAGCCCUGGAGGCGAUCCUGACGGGUACGACGGGGGA | |
| (excluding | AAUAACUCGCAAUAUCCCUCAGCCUCAGGCUCAUCGGGU | |
| the stop | AAUACUCCGACCCCUCCAAACGACGAGGAAAGGGAAUCC | |
| codon) | AAUGAGGAACCGCCUCCACCAUAUGAGGAUCCGUACUGG | |
| | GGGAACGGUGAUAGGCACAGUGACUACCAGCCACUUGGG | |
| | ACACAAGACCAAAGCCUGUACCUCGGACUUCAGCACGAU | |
| | GGUAACGACGGUUUGCCGCCUCCCCCUUAUAGCCCUAGA | |
| | GAUGAUAGCUCCCAGCAUAUAUACGAGGAGGCUGGUAGG | |
| | GGCUCCAUGAAUCCAGUAUGCUUGCCCGUUAUCGUAGCC | |
| | CCCUACCUCUUCUGGCUUGCGGCGAUCGCAGCUAGCUGU | |
| | UUUACAGCUUCCGUGAGCACAGUCGUAACCGCGACAGGA | |
| | CUGGCACUGUCUCUACUCCUCUUGGCAGCGGUUGCCAGC | |
| | AGCUACGCCGCCGCUCAGCGGAAACUGCUCACCCCUGUUA | |
| | CAGUCUUAACUGCAGUUGUGACCUUCUUCGCCAUUUGUU | |
| | UGACAUGGAGGAUCGAAGAUCCUCCAUUUAAUAGUCUCC | |
| | UGUUUGCACUGCUGGCCGCUGCGGGCGGGCUACAAGGGA | |
| | UAUAUGUGCUAGUAAUGCUCGUCCUACUUAUUCUGGCCU | |
| | AUAGGCGGAGGUGGCGGCGCCUGACAGUGUGCGGAGGGA | |
| | UAAUGUUCCUAGCCUGUGUGCUCGUGCUCAUUGUGGACG | |
| | CUGUUCUACAGUUGUCUCCUCUGCUGGGUGCAGUGACGG | |
| | UGGUCUCAAUGACCCUGCUGUUACUUGCCUUCGUGCUUU | |
| | GGUUGUCAUCUCCAGGGGGACUGGGCACACUGGGCGCCG | |
| | CCCUGUUAACCCUGGCGGCCGCUCUGGCACUCCUGGCCUC | |
| | ACUGAUUCUGGGAACUCUGAAUCUCACCACUAUGUUUCU | |
| | UCUGAUGUUAUUGUGGACUUUGGUGGUGUUGCUGAUUUG | |
| | CAGCUCCUGCAGUUCUUGCCCCCUAUCCAAAAUAUUACU | |
| | GGCGCGGCUGUUCCUUUAUGCCCUCGCCUUACUGCUGCUC | |
| | GCUAGCGCCUUAAUUGCUGGGGGCUCCAUUCUUCAGACC | |
| | AACUUUAAAUCCCUGUCCAGCACUGAAUUCAUCCCCAACC | |
| | UUUUUUGCAUGCUGCUCCUAAUCGUGGCUGGGAUUCUGU | |
| | UUAUUCUGGCCAUUUUGACCGAGUGGGGCAGUGGCAACA | |
| | GGACCUACGGCCCUGUGUUCAUGUGUCUGGGGGGGCUCU | |
| | UAACGAUGGUCGCUGGCGCUGUCUGGCUCACGGUGAUGA | |
| | GUAACACUUUGCUCAGCGCGUGGAUCCUGACAGCCGGCU | |
| | UUCUCAUUUUUCUGAUUGGGUUCGCUUUGUUUGGAGUCA | |
| | UUCGGUGUUGCCGCUAUUGCUGUUACUAUUGUUUGACAU | |
| | UGGAGUCCGAGGAGAGGCCACCCACCCCCUACCGAAAUAC | |
| | GGUA | |
| 3′ UTR | UGAUAAUAGGCUGGAGCCUCGGUGGCCAUGCUUCUUGCC | 3 |
| | CCUUGGGCCUCCCCCCAGCCCCUCCUCCCCUUCCUGCACC | |
| | CGUACCCCCGUGGUCUUUGAAUAAAGUCUGAGUGGGCGG | |
| | C | |
| Corresponding | MGSLEMVPMGAGPPSPGGDPDGYDGGNNSQYPSASGSSGNT | 22 |
| amino acid | PTPPNDEERESNEEPPPPYEDPYWGNGDRHSDYQPLGTQDQSL | |
| sequence | YLGLQHDGNDGLPPPPYSPRDDSSQHIYEEAGRGSMNPVCLP | |
| | VIVAPYLFWLAAIAASCFTASVSTVVTATGLALSLLLLAAVAS | |
| | SYAAAQRKLLTPVTVLTAVVTFFAICLTWRIEDPPFNSLLFALL | |
| | AAAGGLQGIYVLVMLVLLILAYRRRWRRLTVCGGIMFLACVL | |
| | VLIVDAVLQLSPLLGAVTVVSMTLLLLAFVLWLSSPGGLGTL | |
| | GAALLTLAAALALLASLILGTLNLTTMFLLMLLWTLVVLLICS | |
| | SCSSCPLSKILLARLFLYALALLLLASALIAGGSILQTNFKSLSS | |
| | TEFIPNLFCMLLLIVAGILFILAILTEWGSGNRTYGPVFMCLGG | |
| | LLTMVAGAVWLTVMSNTLLSAWILTAGFLIFLIGFALFGVIRC | |
| | CRYCCYYCLTLESEERPPTPYRNTV | |
| PolyA tail | 100 nt | |

LMP2_002

| SEQ ID NO: 146 consists of from 5′ end to 3′ end: | | 146 |
|---|---|---|
| 5′ UTR SEQ ID NO: 1, mRNA ORF SEQ ID NO: 23, and | | |
| 3′ UTR SEQ ID NO: 3 | | |
| Chemistry | 1-methylpseudouridine | |
| Cap | 7mG(5′)ppp(5′)NlmpNp | |
| 5′ UTR | GGGAAAUAAGAGAGAAAAGAAGAGUAAGAAGAAAUAUA | 1 |
| | AGAGCCACC | |
| ORF of mRNA | AUGGGAUCCUUGGAAAUGGUGCCCAUGGGAGCCGGACCC | 23 |
| Construct | CCCUCACCAGGGGGAGACCCAGACGGAUACGACGGGGGA | |
| (excluding | AACAAUUCUCAGUAUCCGAGCGCGUCCGGCAGCUCAGGA | |
| the stop | AACACACCCACCCCCCCCAACGACGAGGAGAGAGAAUCCA | |
| codon) | ACGAGGAGCCUCCUCCCCCAUACGAAGACCCUUACUGGGG | |
| | GAAUGGAGACCGUCAUUCUGACUAUCAACCUCUAGGCAC | |
| | UCAGGACCAGUCUCUUUACCUAGGGUUACAACACGAUGG | |
| | UAAUGAUGGGUUGCCCCCGCCGCCCUAUAGUCCCCGGGAC | |
| | GACAGUAGUCAGCAUAUAUAUGAGGAAGCCGGCAGAGGU | |
| | UCUAUGAAUCCCGUUUGUCUACCGGUCAUUGUCGCCCCC | |
| | UAUUUAUUCUGGCUUGCAGCCAUCGCCGCUUCGUGCUUC | |
| | ACCGCCUCCGUGUCCACGGUGGUGACAGCUACAGGGCUG | |
| | GCACUCUCUCUGCUACUCCUGGCUGCUGUGGCCAGCUCCU | |
| | ACGCAGCGGCUCAGCGGAAGCUUCUCACUCCUGUAACUG | |
| | UCCUCACCGCGGUAGUGACCUUUUUUGCCAUAUGCCUGA | |
| | CAUGGAGGAUUGAGGACCCACCCUUUAAUUCUCUGCUGU | |
| | UUGCGCUUUUGGCCGCUGCCGGAGGACUGCAAGGUAUUU | |
| | AUGUGCUGGUAAUGUUGGUUCUACUUAUUCUCGCAUACC | |
| | GGCGACGGUGGCGGAGGCUGACUGUAUGCGGGGGGAUUA | |
| | UGUUCCUGGCGUGUGUUCUGGUUUUGAUCGUCGAUGCCG | |
| | UGCUGCAGUUGUCACCGCUGCUCGGGGCGGUCACCGUUG | |
| | UGAGUAUGACACUGCUUCUGCUGGCUUUCGUGCUCUGGC | |
| | UAUCUUCCCCCGGGGGGCUGGGGACCUUGGGCGCUGCGC | |
| | UUCUGACUCUGGCAGCUGCUCUGGCCCUGCUGGCCUCUCU | |
| | UAUUCUUGGCACACUGAAUUUGACUACCAUGUUCCUCUU | |
| | GAUGUUGCUGUGGACCUUAGUUGUGCUGCUGAUCUGUUC | |
| | UUCCUGUAGCAGCUGUCCACUGUCCAAGAUUCUCCUGGC | |
| | CAGGUUGUUUCUGUAUGCCCUAGCGCUGCUGCUGUUAGC | |
| | UUCUGCUCUGAUAGCCGGCGGCAGUAUCCUGCAAACCAA | |
| | CUUCAAGAGCCUCUCCAGCACAGAAUUCAUCCCUAAUCUC | |
| | UUUUGCAUGCUACUGCUCAUCGUGGCAGGCAUACUGUUC | |
| | AUUCUUGCUAUCCUGACUGAAUGGGGCUCUGGCAAUAGA | |
| | ACAUACGGGCCAGUGUUCAUGUGCUUGGGCGGCCUGUUG | |
| | ACAAUGGUUGCUGGAGCCGUGUGGCUGACGGUAAUGUCC | |
| | AACACUCUGCUGAGCGCAUGGAUCUUAACAGCCGGAUUC | |
| | CUGAUCUUUUUAAUCGGAUUCGCACUCUUCGGAGUGAUC | |
| | CGGUGCUGUAGGUAUUGUUGUUAUUACUGCCUGACACUC | |
| | GAGUCGGAAGAGAGGCCCCCUACACCUUACCGGAAUACA | |
| | GUU | |
| 3′ UTR | UGAUAAUAGGCUGGAGCCUCGGUGGCCAUGCUUCUUGCC | 3 |
| | CCUUGGGCCUCCCCCCAGCCCCUCCUCCCCUUCCUGCACC | |
| | CGUACCCCCGUGGUCUUUGAAUAAAGUCUGAGUGGGCGG | |
| | C | |
| Corresponding | MGSLEMVPMGAGPPSPGGDPDGYDGGNNSQYPSASGSSGNT | 22 |
| amino acid | PTPPNDEERESNEEPPPPYEDPYWGNGDRHSDYQPLGTQDQSL | |
| sequence | YLGLQHDGNDGLPPPPYSPRDDSSQHIYEEAGRGSMNPVCLP | |
| | VIVAPYLFWLAAIAASCFTASVSTVVTATGLALSLLLLAAVAS | |
| | SYAAAQRKLLTPVTVLTAVVTFFAICLTWRIEDPPFNSLLFALL | |
| | AAAGGLQGIYVLVMLVLLILAYRRRWRRLTVCGGIMFLACVL | |
| | VLIVDAVLQLSPLLGAVTVVSMTLLLLAFVLWLSSPGGLGTL | |
| | GAALLTLAAALALLASLILGTLNLTTMFLLMLLWTLVVLLICS | |
| | SCSSCPLSKILLARLFLYALALLLLASALIAGGSILQTNFKSLSS | |
| | TEFIPNLFCMLLLIVAGILFILAILTEWGSGNRTYGPVFMCLGG | |
| | LLTMVAGAVWLTVMSNTLLSAWILTAGFLIFLIGFALFGVIRC | |
| | CRYCCYYCLTLESEERPPTPYRNTV | |
| PolyA tail | 100 nt | |

LMP2_003

| SEQ ID NO: 147 consists of from 5′ end to 3′ end: | | 147 |
|---|---|---|
| 5′ UTR SEQ ID NO: 1, mRNA ORF SEQ ID NO: 24, and | | |
| 3′ UTR SEQ ID NO: 3 | | |
| Chemistry | 1-methylpseudouridine | |
| Cap | 7mG(5′)ppp(5′)NlmpNp | |
| 5′ UTR | GGGAAAUAAGAGAGAAAAGAAGAGUAAGAAGAAAUAUA | 1 |
| | AGAGCCACC | |
| ORF of mRNA | AUGGGGUCGUUGGAGAUGGUCCCCAUGGGCGCUGGUCCU | 24 |
| Construct | CCAAGCCCCGGCGGGGACCCGGACGGAUACGACGGGGGC | |
| (excluding | AAUAAUAGUCAGUAUCCGAGUGCAAGCGGAAGCAGUGGG | |
| the stop | AAUACGCCUACACCACCAAACGACGAGGAGCGGGAGUCU | |
| codon) | AACGAGGAGCCUCCACCCCCUUACGAGGAUCCUUACUGG | |
| | GGGAACGGAGAUCGACAUUCUGACUACCAGCCUUUAGGG | |
| | ACACAGGAUCAGUCUCUCUAUCUCGGACUGCAGCAUGAU | |
| | GGCAACGACGGACUGCCCCCACCACCUUAUUCUCCACGCG | |
| | ACGACAGCUCACAGCACAUAUACGAAGAGGCCGGGCGCG | |
| | GGUCUAUGAACCCGGUUUGCCUGCCAGUCAUCGUCGCAC | |
| | CCUACCUCUUUUGGCUGGCGGCCAUUGCCGCGUCCUGUU | |
| | UCACAGCCUCAGUGUCGACUGUGGUAACCGCAACAGGGC | |
| | UCGCACUCAGCCUACUGCUGCUCGCUGCCGUCGCGUCCUC | |
| | UUAUGCUGCUGCCCAGCGCAAACUGCUCACCCCAGUUACG | |
| | GUGCUCACUGCUGUUGUUACCUUUUUCGCUAUUUGUCUC | |
| | ACCUGGAGAAUCGAAGACCCGCCGUUCAACAGUCUGUUA | |
| | UUUGCCCUCUUGGCUGCAGCAGGCGGCCUUCAGGGCAUC | |
| | UAUGUCCUGGUGAUGCUGGUCCUGCUCAUCCUGGCUUAC | |
| | AGGAGAAGAUGGCGUCGGCUGACCGUGUGUGGUGGCAUC | |
| | AUGUUUCUCGCGUGUGUUCUGGUGCUCAUCGUCGAUGCC | |
| | GUGCUACAGCUGAGCCCACUGCUUGGAGCCGUGACAGUC | |
| | GUUAGCAUGACACUCCUGCUAUUGGCUUUCGUGCUCUGG | |
| | CUGAGUAGCCCAGGUGGGCUCGGCACACUUGGUGCCGCG | |
| | CUUUUAACACUGGCCGCGGCCCUCGCACUGCUGGCCUCUC | |
| | UAAUUCUCGGAACAUUGAACCUGACAACCAUGUUCCUCC | |
| | UGAUGCUCCUCUGGACACUGGUGGUACUGUUAAUCUGUA | |
| | GCUCUUGCUCAUCAUGCCCACUGAGCAAGAUACUCCUGG | |
| | CGAGACUUUUCCUAUACGCCCUGGCCCUGCUGCUGUUGG | |
| | CAUCGGCUCUGAUCGCUGGGGGAAGCAUCCUUCAAACAA | |
| | AUUUCAAGAGCCUUAGCAGUACUGAGUUUAUACCUAACC | |
| | UGUUCUGUAUGCUUCUGCUGAUAGUCGCUGGGAUACUUU | |
| | UUAUUCUGGCAAUCCUAACAGAGUGGGGGUCAGGUAACA | |
| | GGACCUAUGGGCCUGUUUUUAUGUGCCUCGGAGGCCUCC | |
| | UCACCAUGGUUGCCGGCGCAGUUUGGUUGACAGUGAUGU | |
| | CCAACACCCUACUGAGUGCUUGGAUACUGACGGCCGGGU | |
| | UCCUGAUUUUCCUAAUAGGAUUUGCCCUGUUUGGGGUUA | |
| | UCCGGUGCUGCCGUUACUGCUGCUACUAUUGUUUGACCC | |
| | UUGAGUCUGAAGAAAGGCCGCCCACCCCCUACAGAAACA | |
| | CUGUA | |
| 3′ UTR | UGAUAAUAGGCUGGAGCCUCGGUGGCCAUGCUUCUUGCC | 3 |
| | CCUUGGGCCUCCCCCCAGCCCCUCCUCCCCUUCCUGCACC | |
| | CGUACCCCCGUGGUCUUUGAAUAAAGUCUGAGUGGGCGG | |
| | C | |
| Corresponding | MGSLEMVPMGAGPPSPGGDPDGYDGGNNSQYPSASGSSGNT | 22 |
| amino acid | PTPPNDEERESNEEPPPPYEDPYWGNGDRHSDYQPLGTQDQSL | |
| sequence | YLGLQHDGNDGLPPPPYSPRDDSSQHIYEEAGRGSMNPVCLP | |
| | VIVAPYLFWLAAIAASCFTASVSTVVTATGLALSLLLLAAVAS | |
| | SYAAAQRKLLTPVTVLTAVVTFFAICLTWRIEDPPFNSLLFALL | |
| | AAAGGLQGIYVLVMLVLLILAYRRRWRRLTVCGGIMFLACVL | |
| | VLIVDAVLQLSPLLGAVTVVSMTLLLLAFVLWLSSPGGLGTL | |
| | GAALLTLAAALALLASLILGTLNLTTMFLLMLLWTLVVLLICS | |
| | SCSSCPLSKILLARLFLYALALLLLASALIAGGSILQTNFKSLSS | |
| | TEFIPNLFCMLLLIVAGILFILAILTEWGSGNRTYGPVFMCLGG | |
| | LLTMVAGAVWLTVMSNTLLSAWILTAGFLIFLIGFALFGVIRC | |
| | CRYCCYYCLTLESEERPPTPYRNTV | |
| PolyA tail | 100 nt | |

LMP2_004

| SEQ ID NO: 148 consists of from 5′ end to 3′ end: | | 148 |
|---|---|---|
| 5′ UTR SEQ ID NO: 1, mRNA ORF SEQ ID NO: 25, and | | |
| 3′ UTR SEQ ID NO: 3 | | |
| Chemistry | 1-methylpseudouridine | |
| Cap | 7mG(5′)ppp(5′)NlmpNp | |
| 5′ UTR | GGGAAAUAAGAGAGAAAAGAAGAGUAAGAAGAAAUAUA | 1 |
| | AGAGCCACC | |
| ORF of mRNA | AUGGGGUCAUUGGAGAUGGUGCCUAUGGGGGCCGGCCCA | 25 |
| Construct | CCCAGCCCAGGGGGCGAUCCUGACGGAUACGACGGGGGC | |
| (excluding | AAUAAUUCACAAUAUCCUAGCGCCAGCGGAUCUUCUGGG | |
| the stop | AAUACCCCCACACCACCUAACGACGAGGAACGGGAGUCA | |
| codon) | AACGAGGAACCCCCACCGCCGUACGAGGACCCAUACUGGG | |
| | GGAACGGGGAUCGACACUCAGACUACCAGCCUCUCGGAA | |
| | CGCAGGAUCAAAGCCUGUACCUGGGACUGCAGCACGAUG | |
| | GUAACGAUGGACUGCCACCACCUCCUUACAGUCCAAGGG | |
| | AUGACUCCAGCCAGCACAUUUAUGAAGAAGCCGGCCGAG | |
| | GUAGUAUGAAUCCAGUGUGUCUGCCCGUGAUUGUCGCCC | |
| | CUUAUCUCUUUUGGCUGGCCGCCAUUGCCGCCAGCUGUU | |
| | UCACCGCGUCGGUUUCAACCGUAGUGACCGCCACAGGCCU | |
| | GGCUCUCAGCUUGUUACUGUUGGCCGCUGUGGCGAGCUC | |
| | CUACGCCGCCGCCCAGCGCAAGCUACUUACCCCUGUGACA | |
| | GUGCUGACGGCGGUGGUUACAUUCUUCGCCAUUUGCCUG | |
| | ACCUGGCGAAUUGAGGAUCCACCAUUCAAUUCCUUAUUG | |
| | UUUGCCCUCCUCGCCGCUGCUGGAGGGCUCCAGGGUAUC | |
| | UACGUGCUGGUGAUGCUCGUUUUGCUGAUAUUGGCUUAC | |
| | CGGCGGCGCUGGCGCCGCCUUACCGUCUGCGGAGGAAUC | |
| | AUGUUUUUGGCAUGCGUGCUCGUUCUCAUUGUGGAUGCU | |
| | GUUUUGCAGCUGUCACCCCUGUUGGGUGCCGUGACAGUU | |
| | GUAAGUAUGACCCUGCUCCUGCUCGCAUUCGUGCUCUGG | |
| | CUGAGCUCUCCCGGGGGGCUGGGCACUCUCGGAGCAGCU | |
| | CUGCUGACACUAGCCGCAGCACUAGCCCUUCUGGCCAGUC | |
| | UUAUCCUCGGAACGCUGAACCUGACGACCAUGUUCCUCC | |
| | UGAUGUUGCUCUGGACCCUCGUAGUGCUGUUAAUAUGCU | |
| | CUAGCUGUAGCUCCUGCCCUCUGAGCAAGAUUCUCCUUG | |
| | CUAGGCUGUUCCUAUACGCCCUCGCUCUCCUAUUGCUGGC | |
| | GAGCGCUCUCAUCGCCGGUGGGAGCAUCCUGCAGACUAA | |
| | CUUCAAGUCCCUGAGUUCAACAGAAUUCAUUCCCAACCU | |
| | CUUUUGUAUGCUGCUGCUUAUCGUGGCCGGCAUCCUCUU | |
| | UAUCCUCGCCAUCUUGACUGAGUGGGGGUCCGGAAAUCG | |
| | CACAUAUGGCCCAGUUUUCAUGUGUCUGGGGGGCCUGCU | |
| | CACGAUGGUGGCCGGCGCAGUGUGGCUGACGGUAAUGUC | |
| | AAACACUUUGCUCUCUGCGUGGAUCUUGACCGCAGGCUU | |
| | CCUGAUCUUUUUGAUCGGCUUCGCCCUGUUCGGUGUCAU | |
| | CCGGUGCUGCAGAUACUGCUGCUACUAUUGCCUCACACU | |
| | CGAAUCCGAAGAGAGGCCUCCCACACCUUACCGAAAUAC | |
| | AGUG | |
| 3′ UTR | UGAUAAUAGGCUGGAGCCUCGGUGGCCAUGCUUCUUGCC | 3 |
| | CCUUGGGCCUCCCCCCAGCCCCUCCUCCCCUUCCUGCACC | |
| | CGUACCCCCGUGGUCUUUGAAUAAAGUCUGAGUGGGCGG | |
| | C | |
| Corresponding | MGSLEMVPMGAGPPSPGGDPDGYDGGNNSQYPSASGSSGNT | 22 |
| amino acid | PTPPNDEERESNEEPPPPYEDPYWGNGDRHSDYQPLGTQDQSL | |
| sequence | YLGLQHDGNDGLPPPPYSPRDDSSQHIYEEAGRGSMNPVCLP | |
| | VIVAPYLFWLAAIAASCFTASVSTVVTATGLALSLLLLAAVAS | |
| | SYAAAQRKLLTPVTVLTAVVTFFAICLTWRIEDPPFNSLLFALL | |
| | AAAGGLQGIYVLVMLVLLILAYRRRWRRLTVCGGIMFLACVL | |
| | VLIVDAVLQLSPLLGAVTVVSMTLLLLAFVLWLSSPGGLGTL | |
| | GAALLTLAAALALLASLILGTLNLTTMFLLMLLWTLVVLLICS | |
| | SCSSCPLSKILLARLFLYALALLLLASALIAGGSILQTNFKSLSS | |
| | TEFIPNLFCMLLLIVAGILFILAILTEWGSGNRTYGPVFMCLGG | |
| | LLTMVAGAVWLTVMSNTLLSAWILTAGFLIFLIGFALFGVIRC | |
| | CRYCCYYCLTLESEERPPTPYRNTV | |
| PolyA tail | 100 nt | |

LMP2_005

| SEQ ID NO: 149 consists of from 5′ end to 3′ end: | | 149 |
|---|---|---|
| 5′ UTR SEQ ID NO: 1, mRNA ORF SEQ ID NO: 26, and | | |
| 3′ UTR SEQ ID NO: 3 | | |
| Chemistry | 1-methylpseudouridine | |
| Cap | 7mG(5′)ppp(5′)NlmpNp | |
| 5′ UTR | GGGAAAUAAGAGAGAAAAGAAGAGUAAGAAGAAAUAUA | 1 |
| | AGAGCCACC | |
| ORF of mRNA | AUGGGGUCUUUAGAAAUGGUCCCCAUGGGUGCCGGCCCA | 26 |
| Construct | CCCUCGCCAGGAGGCGAUCCAGACGGCUACGACGGGGGA | |
| (excluding | AACAACAGCCAGUACCCCAGCGCCAGCGGUAGCAGCGGCA | |
| the stop | ACACCCCGACCCCACCAAACGACGAAGAGCGGGAGAGCAA | |
| codon) | UGAGGAGCCCCCACCCCCCUAUGAGGACCCUUACUGGGGA | |
| | AAUGGCGAUCGACACAGCGAUUACCAGCCCCUGGGCACA | |
| | CAGGAUCAGAGCCUGUACCUGGGCUUGCAGCAUGAUGGU | |
| | AACGACGGGCUUCCGCCCCCACCAUACUCACCCAGAGACG | |
| | AUUCAAGUCAGCACAUCUACGAGGAGGCUGGUAGGGGUA | |
| | GUAUGAAUCCUGUGUGUCUCCCUGUGAUCGUCGCCCCCU | |
| | ACCUAUUUUGGUUAGCUGCGAUCGCUGCCUCCUGCUUCA | |
| | CCGCUAGCGUGUCAACAGUGGUUACGGCAACCGGGCUGG | |
| | CGUUAAGUCUGCUUCUGCUUGCGGCAGUGGCAUCUUCUU | |
| | AUGCAGCGGCCCAGCGGAAGCUUUUGACCCCUGUGACAG | |
| | UACUGACCGCAGUGGUUACGUUUUUUGCGAUUUGCUUGA | |
| | CGUGGAGAAUAGAGGAUCCCCCUUUUAACUCACUGCUCU | |
| | UUGCACUGCUCGCGGCUGCUGGGGGCCUGCAGGGGAUUU | |
| | ACGUCCUCGUUAUGCUGGUGCUCCUGAUCUUAGCCUACA | |
| | GAAGGAGAUGGCGCCGACUGACAGUAUGCGGGGGGAUUA | |
| | UGUUUUUGGCAUGUGUACUCGUAUUGAUCGUGGAUGCCG | |
| | UCUUGCAGCUUUCCCCCCUGCUGGGCGCAGUCACCGUCGU | |
| | GAGUAUGACUCUGCUGUUACUGGCCUUCGUACUGUGGCU | |
| | UAGCAGCCCUGGAGGACUAGGCACGCUGGGCGCCGCUUU | |
| | AUUGACCCUGGCAGCCGCCCUGGCUCUGCUGGCCUCCCUG | |
| | AUACUGGGGACAUUAAAUUUAACAACUAUGUUUCUGCUG | |
| | AUGCUGCUGUGGACUCUAGUUGUGCUCUUGAUAUGUUCC | |
| | UCCUGUUCCAGCUGCCCUCUGAGCAAGAUCCUGUUGGCU | |
| | CGGCUAUUCCUGUACGCGCUGGCUCUCCUCCUGCUAGCUU | |
| | CAGCGCUAAUUGCAGGCGGGUCUAUUCUCCAGACGAAUU | |
| | UUAAGAGCCUCAGUAGCACUGAGUUUAUCCCGAAUCUGU | |
| | UCUGCAUGUUGCUAUUGAUCGUCGCAGGCAUUCUCUUCA | |
| | UUCUGGCCAUACUUACAGAGUGGGGUAGCGGCAACCGGA | |
| | CUUAUGGCCCUGUGUUCAUGUGCUUGGGGGGCCUUCUCA | |
| | CAAUGGUGGCAGGGGCGGUAUGGCUGACCGUGAUGUCUA | |
| | ACACCUUGUUAUCAGCCUGGAUCCUUACCGCCGGCUUCCU | |
| | AAUUUUUCUGAUCGGCUUCGCCCUCUUCGGAGUAAUACG | |
| | AUGCUGUCGGUACUGCUGCUACUAUUGCCUUACUUUGGA | |
| | GAGCGAAGAGCGGCCUCCCACUCCCUAUAGAAACACCGU | |
| | U | |
| 3′ UTR | UGAUAAUAGGCUGGAGCCUCGGUGGCCAUGCUUCUUGCC | 3 |
| | CCUUGGGCCUCCCCCCAGCCCCUCCUCCCCUUCCUGCACC | |
| | CGUACCCCCGUGGUCUUUGAAUAAAGUCUGAGUGGGCGG | |
| | C | |
| Corresponding | MGSLEMVPMGAGPPSPGGDPDGYDGGNNSQYPSASGSSGNT | 22 |
| amino acid | PTPPNDEERESNEEPPPPYEDPYWGNGDRHSDYQPLGTQDQSL | |
| sequence | YLGLQHDGNDGLPPPPYSPRDDSSQHIYEEAGRGSMNPVCLP | |
| | VIVAPYLFWLAAIAASCFTASVSTVVTATGLALSLLLLAAVAS | |
| | SYAAAQRKLLTPVTVLTAVVTFFAICLTWRIEDPPFNSLLFALL | |
| | AAAGGLQGIYVLVMLVLLILAYRRRWRRLTVCGGIMFLACVL | |
| | VLIVDAVLQLSPLLGAVTVVSMTLLLLAFVLWLSSPGGLGTL | |
| | GAALLTLAAALALLASLILGTLNLTTMFLLMLLWTLVVLLICS | |
| | SCSSCPLSKILLARLFLYALALLLLASALIAGGSILQTNFKSLSS | |
| | TEFIPNLFCMLLLIVAGILFILAILTEWGSGNRTYGPVFMCLGG | |
| | LLTMVAGAVWLTVMSNTLLSAWILTAGFLIFLIGFALFGVIRC | |
| | CRYCCYYCLTLESEERPPTPYRNTV | |
| PolyA tail | 100 nt | |

gp350_mod_001

| SEQ ID NO: 150 consists of from 5′ end to 3′ end: | | 150 |
|---|---|---|
| 5′ UTR SEQ ID NO: 1, mRNA ORF SEQ ID NO: 27, and | | |
| 3′ UTR SEQ ID NO: 3 | | |
| Chemistry | 1-methylpseudouridine | |
| Cap | 7mG(5′)ppp(5′)NlmpNp | |
| 5′ UTR | GGGAAAUAAGAGAGAAAAGAAGAGUAAGAAGAAAUAUA | 1 |
| | AGAGCCACC | |
| ORF of mRNA | AUGGAGGCAGCACUGCUGGUCUGCCAGUAUACAAUCCAG | 27 |
| Construct | UCGCUCAUUCAUCUGACAGGCGAGGACCCCGGCUUCUUU | |
| (excluding | AACGUGGAAAUCCCAGAGUUCCCUUUCUAUCCAACCUGU | |
| the stop | AACGUUUGCACUGCUGACGUGAACGUGACAAUCAAUUUC | |
| codon) | GACGUGGGAGGAAAGAAGCAUCAGCUUGAUCUGGAUUUC | |
| | GGCCAACUGACGCCACACACCAAAGCGGUGUACCAACCAA | |
| | GGGGUGCAUUUGGAGGGAGCGAGAAUGCUACAAAUCUGU | |
| | UUUUACUGGAACUGCUUGGUGCAGGAGAGCUGGCACUAA | |
| | CCAUGCGAAGCAAGAAGCUCCCCAUCAACGUUACCACCGG | |
| | GGAAGAACAGCAAGUCAGCCUUGAAUCCGUGGAUGUGUA | |
| | CUUUCAGGAUGUUUUCGGCACCAUGUGGUGUCACCACGC | |
| | UGAGAUGCAGAAUCCCGUGUAUCUCAUACCCGAGACUGU | |
| | ACCCUACAUCAAGUGGGAUAAUUGCAAUUCAACUAAUAU | |
| | UACGGCUGUGGUGAGGGCCCAGGGCUUGGACGUGACUCU | |
| | GCCCUUAUCUCUACCUACUUCUGCCCAAGACUCCAAUUUU | |
| | UCUGUCAAGACCGAGAUGCUCGGGAAUGAGAUCGAUAUC | |
| | GAGUGCAUCAUGGAGGACGGUGAGAUAAGCCAGGUUCUG | |
| | CCCGGCGACAACAAGUUCAAUAUCACUUGUUCUGGCUAC | |
| | GAGUCCCAUGUGCCUAGUGGUGGCAUACUCACAAGUACU | |
| | UCUCCCGUAGCCACCCCCAUUCCCGGAACCGGAUACGCCU | |
| | ACAGUCUGCGUCUGACCCCACGGCCUGUGUCCAGAUUCCU | |
| | GGGUAACAAUAGUAUCUUAUACGUGUUUUAUAGCGGAAA | |
| | CGGCCCUAAAGCGUCCGGAGGGGACUAUUGUAUUCAGAG | |
| | UAAUAUCGUUUUCUCUGAUGAGAUUCCUGCCAGUCAGGA | |
| | CAUGCCGACAAACACAACUGAUAUUACCUACGUGGGCGA | |
| | CAAUGCCACGUAUUCAGUGCCCAUGGUCACGAGCGAGGA | |
| | CGCCAAUUCACCAAAUGUUACUGUAACAGCUUUUUGGGC | |
| | CUGGCCAAAUAACACUGAGACUGACUUCAAAUGUAAGUG | |
| | GACUUUGACCUCUGGAACUCCGUCGGGUUGCGAGAAUAU | |
| | CAGCGGGGCCUUUGCUUCCAACAGGACUUUCGACAUCAC | |
| | UGUCUCAGGGCUGGGGACAGCACCGAAAACAUUAAUCAU | |
| | AACACGGACCGCCACCAACGCCACGACUACAACCCAUAAG | |
| | GUGAUCUUUUCCAAGGCACCUGAGUCCACCACUACCUCCC | |
| | CGACUCUUAACACUACGGGCUUCGCUGAUCCCAACACCAC | |
| | UACGGGGUUGCCUAGCUCGACACAUGUGCCGACGAACCU | |
| | GACUGCCCCUGCAUCGACCGGGCCCACAGUUUCGACCGCC | |
| | GAUGUGACAUCACCAACCCCCGCAGGUACAACCUCAGGCG | |
| | CCAGCCCAGUGACCCCUUCCCCAAGCCCCUGGGAUAAUGG | |
| | AACGGAGUCCAAGGCUCCUGAUAUGACUUCCUCUACCAG | |
| | CCCCGUGACUACACCCACUCCCAACGCAACUAGCCCAACC | |
| | CCAGCUGUGACGACCCCCACCCCGAACGCGACAUCUCCCA | |
| | CACCUGCUGUGACAACCCCAACCCCUAACGCCACUAGCCC | |
| | UACCCUAGGUAAGACCAGUCCGACUAGCGCCGUUACAAC | |
| | CCCUACCCCUAACGCAACCGGCCCGACCGUGGGCGAGACU | |
| | UCCCCGCAAGCCAAUGCGACAAAUCACACAUUGGGCGGG | |
| | ACCUCUCCUACACCAGUCGUUACAUCUCAGCCUAAGAACG | |
| | CUACCUCCGCUGUCACUACCGGACAGCACAACAUCACCAG | |
| | CUCAAGCACGAGUUCCAUGAGCUUGCGGCCGAGCUCAAA | |
| | UCCCGAGACCCUAUCACCAUCCACAUCAGACAACAGUACU | |
| | UCACACAUGCCACUCUUGACGAGCGCUCACCCCACCGGCG | |
| | GCGAGAACAUCACCCAGGUGACUCCGGCGUCUAUUUCCA | |
| | CCCACCACGUCAGCACGUCGUCUCCCGCACCGAGACCAGG | |
| | GACGACUUCUCAGGCCAGUGGGCCUGGCAACUCCUCUAC | |
| | AAGCACAAAACCAGGCGAAGUUAACGUGACAAAAGGAAC | |
| | GCCCCCCCAGAACGCAACCAGUCCUCAGGCCCCCAGCGGG | |
| | CAGAAAACUGCGGUGCCAACUGUGACCAGCACCGGUGGC | |
| | AAGGCCAACUCAACAACUGGAGGCAAGCAUACGACGGGG | |
| | CACGGCGCCCGGACCUCCACUGAACCCACGACCGAUUACG | |
| | GAGGUGACAGCACAACACCGCGGCCACGAUAUAAUGCCA | |
| | CCACUUAUCUGCCACCAUCCACAAGCUCCAAGCUGCGGCC | |
| | ACGGUGGACCUUCACAAGCCCACCCGUGACGACUGCCCAA | |
| | GCGACGGUGCCAGUGCCCCCUACAAGCCAGCCACGCUUCU | |
| | CCAACCUUAGUAUGCUCGUUCUCCAGUGGGCCAGCCUUG | |
| | CUGUUCUGACCCUCCUCCUGCUGCUCGUGAUGGCCGAUU | |
| | GCGCCUUUAGGAGAAACCUCAGCACUAGCCACACGUACA | |
| | CCACGCCCCCCUACGAUGACGCCGAGACUUACGUC | |
| 3′ UTR | UGAUAAUAGGCUGGAGCCUCGGUGGCCAUGCUUCUUGCC | 3 |
| | CCUUGGGCCUCCCCCCAGCCCCUCCUCCCCUUCCUGCACC | |
| | CGUACCCCCGUGGUCUUUGAAUAAAGUCUGAGUGGGCGG | |
| | C | |
| Corresponding | MEAALLVCQYTIQSLIHLTGEDPGFFNVEIPEFPFYPTCNVCTA | 28 |
| amino acid | DVNVTINFDVGGKKHQLDLDFGQLTPHTKAVYQPRGAFGGS | |
| sequence | ENATNLFLLELLGAGELALTMRSKKLPINVTTGEEQQVSLESV | |
| | DVYFQDVFGTMWCHHAEMQNPVYLIPETVPYIKWDNCNSTN | |
| | ITAVVRAQGLDVTLPLSLPTSAQDSNFSVKTEMLGNEIDIECIM | |
| | EDGEISQVLPGDNKFNITCSGYESHVPSGGILTSTSPVATPIPGT | |
| | GYAYSLRLTPRPVSRFLGNNSILYVFYSGNGPKASGGDYCIQS | |
| | NIVFSDEIPASQDMPTNTTDITYVGDNATYSVPMVTSEDANSP | |
| | NVTVTAFWAWPNNTETDFKCKWTLTSGTPSGCENISGAFASN | |
| | RTFDITVSGLGTAPKTLIITRTATNATTTTHKVIFSKAPESTTTS | |
| | PTLNTTGFADPNTTTGLPSSTHVPTNLTAPASTGPTVSTADVTS | |
| | PTPAGTTSGASPVTPSPSPWDNGTESKAPDMTSSTSPVTTPTPN | |
| | ATSPTPAVTTPTPNATSPTPAVTTPTPNATSPTLGKTSPTSAVT | |
| | TPTPNATGPTVGETSPQANATNHTLGGTSPTPVVTSQPKNATS | |
| | AVTTGQHNITSSSTSSMSLRPSSNPETLSPSTSDNSTSHMPLLTS | |
| | AHPTGGENITQVTPASISTHHVSTSSPAPRPGTTSQASGPGNSS | |
| | TSTKPGEVNVTKGTPPQNATSPQAPSGQKTAVPTVTSTGGKA | |
| | NSTTGGKHTTGHGARTSTEPTTDYGGDSTTPRPRYNATTYLPP | |
| | STSSKLRPRWTFTSPPVTTAQATVPVPPTSQPRFSNLSMLVLQ | |
| | WASLAVLTLLLLLVMADCAFRRNLSTSHTYTTPPYDDAETYV | |
| PolyA tail | 100 nt | |

gp350_mod_002

| SEQ ID NO: 151 consists of from 5′ end to 3′ end: | | 151 |
|---|---|---|
| 5′ UTR SEQ ID NO: 1, mRNA ORF SEQ ID NO: 29, and | | |
| 3′ UTR SEQ ID NO: 3 | | |
| Chemistry | 1-methylpseudouridine | |
| Cap | 7mG(5′)ppp(5′)NlmpNp | |
| 5′ UTR | GGGAAAUAAGAGAGAAAAGAAGAGUAAGAAGAAAUAUA | 1 |
| | AGAGCCACC | |
| ORF of mRNA | AUGGAGGCUGCUCUAUUGGUGUGCCAAUACACCAUUCAG | 29 |
| Construct | UCGCUGAUCCACUUGACUGGGGAGGAUCCCGGAUUUUUC | |
| (excluding | AACGUGGAGAUUCCGGAAUUCCCUUUUUACCCCACCUGC | |
| the stop | AACGUGUGCACUGCCGACGUAAACGUGACCAUAAACUUU | |
| codon) | GACGUCGGUGGGAAGAAGCACCAGCUGGACCUGGACUUC | |
| | GGGCAGUUAACACCCCACACAAAGGCAGUUUACCAGCCC | |
| | AGAGGAGCCUUCGGCGGAUCGGAGAAUGCAACAAAUCUU | |
| | UUCCUGCUAGAACUGCUCGGCGCCGGCGAGUUGGCCCUG | |
| | ACAAUGAGAAGCAAGAAACUUCCUAUCAACGUAACCACA | |
| | GGGGAGGAGCAGCAGGUCAGCCUCGAAAGUGUUGACGUC | |
| | UAUUUCCAGGAUGUCUUUGGGACUAUGUGGUGCCAUCAC | |
| | GCCGAAAUGCAGAAUCCCGUGUACCUCAUUCCCGAGACA | |
| | GUACCCUAUAUCAAGUGGGACAACUGCAACUCUACUAAU | |
| | AUUACAGCCGUGGUGCGCGCUCAGGGACUUGAUGUAACA | |
| | UUGCCUUUGUCUUUGCCCACAAGCGCUCAGGAUUCUAAU | |
| | UUCUCUGUAAAGACGGAGAUGCUGGGGAAUGAAAUCGAC | |
| | AUAGAAUGUAUUAUGGAAGACGGUGAAAUCAGUCAGGUG | |
| | CUACCGGGAGACAACAAAUUCAAUAUUACAUGUUCUGGC | |
| | UAUGAGAGCCACGUGCCGAGCGGGGGCAUCCUGACUUCG | |
| | ACUUCUCCCGUCGCCACACCCAUACCAGGCACAGGCUACG | |
| | CUUAUAGUCUGAGGCUGACUCCCAGGCCAGUAUCCCGAU | |
| | UUCUGGGUAAUAAUUCCAUCCUUUAUGUGUUUUACUCCG | |
| | GUAACGGCCCCAAAGCUUCGGGGGGCGACUAUUGUAUCC | |
| | AGUCUAAUAUAGUGUUCUCCGAUGAGAUUCCCGCGAGUC | |
| | AGGAUAUGCCCACCAACACCACCGACAUCACGUAUGUUG | |
| | GGGAUAACGCUACCUAUAGUGUGCCGAUGGUGACAUCCG | |
| | AGGACGCAAACUCUCCUAACGUAACCGUGACCGCCUUUU | |
| | GGGCAUGGCCAAAUAAUACCGAAACCGAUUUUAAAUGCA | |
| | AGUGGACCCUGACAUCCGGGACUCCCUCCGGAUGCGAAA | |
| | AUAUUUCUGGAGCUUUUGCCAGCAAUCGGACCUUUGAUA | |
| | UCACUGUGAGUGGUUUAGGCACCGCCCCAAAAACACUGA | |
| | UCAUAACCAGGACAGCCACAAAUGCGACCACAACUACAC | |
| | ACAAAGUUAUAUUUAGUAAAGCACCUGAGUCCACCACAA | |
| | CUUCUCCGACCCUCAACACUACCGGCUUCGCUGAUCCGAA | |
| | UACCACCACAGGUCUUCCAUCUUCCACCCACGUUCCAACU | |
| | AAUCUUACGGCGCCUGCUAGCACCGGUCCAACCGUGUCCA | |
| | CCGCCGAUGUGACUAGCCCCACGCCGGCUGGAACAACAUC | |
| | AGGGGCCAGCCCUGUAACCCCAAGCCCUUCACCCUGGGAC | |
| | AAUGGUACCGAGAGUAAGGCGCCCGACAUGACCUCAUCA | |
| | ACUUCUCCUGUUACAACUCCAACACCAAAUGCCACUAGUC | |
| | CUACCCCCGCAGUCACUACCCCAACGCCUAAUGCAACGUC | |
| | ACCAACUCCUGCAGUGACCACACCAACACCCAAUGCUACU | |
| | UCGCCGACCCUGGGCAAGACCAGCCCAACCAGUGCCGUGA | |
| | CGACACCGACUCCAAAUGCGACCGGACCUACUGUCGGUG | |
| | AGACAAGCCCCCAGGCAAACGCGACCAACCACACCCUCGG | |
| | CGGGACUUCUCCAACACCCGUCGUAACGUCCCAACCAAAA | |
| | AAUGCUACAUCGGCCGUGACUACCGGACAGCAUAAUAUC | |
| | ACCUCAAGCUCCACGUCGUCAAUGAGCCUGCGGCCGUCAA | |
| | GUAAUCCAGAGACUCUGUCGCCAUCUACCUCAGAUAACU | |
| | CAACUAGCCACAUGCCUCUACUCACUAGUGCCCACCCCAC | |
| | CGGCGGGGAGAACAUCACGCAGGUAACACCAGCGUCUAU | |
| | CAGUACUCACCAUGUGAGUACCAGCUCCCCCGCUCCUCGA | |
| | CCGGGAACCACGAGCCAGGCCAGCGGACCGGGUAAUAGU | |
| | AGCACUUCUACUAAACCGGGAGAGGUCAAUGUGACUAAG | |
| | GGGACUCCCCCCCAAAACGCUACCAGCCCACAGGCUCCCU | |
| | CAGGGCAGAAGACCGCUGUUCCAACAGUUACAUCUACUG | |
| | GGGGCAAGGCAAAUAGCACAACCGGUGGCAAGCAUACUA | |
| | CUGGGCACGGUGCCCGCACAAGCACCGAGCCUACAACGGA | |
| | CUAUGGGGGGGAUUCUACCACACCACGUCCCCGGUAUAA | |
| | CGCCACCACGUAUCUUCCGCCUAGCACAUCAAGCAAACUC | |
| | AGACCUCGCUGGACAUUUACAUCACCCCCAGUUACCACUG | |
| | CUCAGGCAACCGUCCCGGUGCCUCCUACUUCACAACCACG | |
| | UUUCAGCAACUUGAGCAUGCUGGUCCUGCAGUGGGCUUC | |
| | CCUCGCCGUGCUGACAUUACUGUUAUUGCUGGUGAUGGC | |
| | CGAUUGCGCGUUUCGCAGGAACCUGUCUACCAGCCACAC | |
| | AUACACAACGCCCCCGUAUGACGACGCAGAGACUUAUGU | |
| | G | |
| 3′ UTR | UGAUAAUAGGCUGGAGCCUCGGUGGCCAUGCUUCUUGCC | 3 |
| | CCUUGGGCCUCCCCCCAGCCCCUCCUCCCCUUCCUGCACC | |
| | CGUACCCCCGUGGUCUUUGAAUAAAGUCUGAGUGGGCGG | |
| | C | |
| Corresponding | MEAALLVCQYTIQSLIHLTGEDPGFFNVEIPEFPFYPTCNVCTA | 28 |
| amino acid | DVNVTINFDVGGKKHQLDLDFGQLTPHTKAVYQPRGAFGGS | |
| sequence | ENATNLFLLELLGAGELALTMRSKKLPINVTTGEEQQVSLESV | |
| | DVYFQDVFGTMWCHHAEMQNPVYLIPETVPYIKWDNCNSTN | |
| | ITAVVRAQGLDVTLPLSLPTSAQDSNFSVKTEMLGNEIDIECIM | |
| | EDGEISQVLPGDNKFNITCSGYESHVPSGGILTSTSPVATPIPGT | |
| | GYAYSLRLTPRPVSRFLGNNSILYVFYSGNGPKASGGDYCIQS | |
| | NIVFSDEIPASQDMPTNTTDITYVGDNATYSVPMVTSEDANSP | |
| | NVTVTAFWAWPNNTETDFKCKWTLTSGTPSGCENISGAFASN | |
| | RTFDITVSGLGTAPKTLIITRTATNATTTTHKVIFSKAPESTTTS | |
| | PTLNTTGFADPNTTTGLPSSTHVPTNLTAPASTGPTVSTADVTS | |
| | PTPAGTTSGASPVTPSPSPWDNGTESKAPDMTSSTSPVTTPTPN | |
| | ATSPTPAVTTPTPNATSPTPAVTTPTPNATSPTLGKTSPTSAVT | |
| | TPTPNATGPTVGETSPQANATNHTLGGTSPTPVVTSQPKNATS | |
| | AVTTGQHNITSSSTSSMSLRPSSNPETLSPSTSDNSTSHMPLLTS | |
| | AHPTGGENITQVTPASISTHHVSTSSPAPRPGTTSQASGPGNSS | |
| | TSTKPGEVNVTKGTPPQNATSPQAPSGQKTAVPTVTSTGGKA | |
| | NSTTGGKHTTGHGARTSTEPTTDYGGDSTTPRPRYNATTYLPP | |
| | STSSKLRPRWTFTSPPVTTAQATVPVPPTSQPRFSNLSMLVLQ | |
| | WASLAVLTLLLLLVMADCAFRRNLSTSHTYTTPPYDDAETYV | |
| PolyA tail | 100 nt | |

gp350_mod_003

| SEQ ID NO: 152 consists of from 5′ end to 3′ end: | | 152 |
|---|---|---|
| 5′ UTR SEQ ID NO: 1, mRNA ORF SEQ ID NO: 30, and | | |
| 3′ UTR SEQ ID NO: 3 | | |
| Chemistry | 1-methylpseudouridine | |
| Cap | 7mG(5′)ppp(5′)NlmpNp | |
| 5′ UTR | GGGAAAUAAGAGAGAAAAGAAGAGUAAGAAGAAAUAUA | 1 |
| | AGAGCCACC | |
| ORF of mRNA | AUGGAAGCCGCUCUUCUGGUCUGCCAGUAUACAAUCCAG | 30 |
| Construct | UCGCUGAUUCAUCUCACCGGCGAGGAUCCAGGUUUCUUU | |
| (excluding | AACGUGGAGAUUCCAGAAUUCCCUUUCUAUCCAACUUGU | |
| the stop | AACGUGUGUACUGCCGACGUUAACGUUACUAUUAACUUU | |
| codon) | GACGUGGGCGGAAAGAAGCACCAGCUGGAUCUUGAUUUC | |
| | GGCCAGCUAACACCUCAUACCAAGGCCGUCUACCAACCAC | |
| | GCGGGGCAUUUGGCGGUUCUGAGAAUGCUACAAACCUGU | |
| | UCCUUUUGGAACUCCUCGGAGCAGGGGAACUGGCACUUA | |
| | CAAUGAGGAGUAAGAAGCUGCCCAUCAACGUCACCACGG | |
| | GGGAAGAACAGCAGGUGUCCCUGGAGUCCGUUGAUGUGU | |
| | AUUUCCAGGACGUUUUCGGGACAAUGUGGUGUCAUCAUG | |
| | CCGAAAUGCAGAAUCCGGUGUAUCUCAUUCCUGAGACCG | |
| | UGCCCUAUAUUAAAUGGGAUAACUGUAAUUCGACAAACA | |
| | UAACUGCCGUAGUGCGUGCCCAGGGUCUGGAUGUAACUU | |
| | UGCCUCUCUCCCUUCCCACUUCUGCCCAGGACUCCAAUUU | |
| | UUCAGUGAAGACCGAAAUGCUUGGGAACGAGAUCGACAU | |
| | CGAGUGUAUCAUGGAGGAUGGGGAGAUCAGUCAGGUGUU | |
| | GCCUGGUGACAAUAAGUUUAAUAUAACAUGUUCCGGCUA | |
| | UGAAUCACAUGUUCCAAGCGGAGGUAUUCUCACAAGUAC | |
| | AUCUCCCGUAGCCACGCCGAUUCCGGGAACCGGAUACGCC | |
| | UAUUCACUUCGGCUGACUCCUCGGCCAGUGUCACGAUUC | |
| | CUGGGCAAUAACUCAAUUCUGUACGUCUUUUACAGCGGC | |
| | AACGGCCCAAAGGCCAGUGGAGGCGAUUACUGUAUCCAG | |
| | UCUAACAUCGUAUUUUCAGAUGAGAUUCCAGCAAGCCAA | |
| | GACAUGCCAACUAAUACUACAGACAUUACAUACGUCGGU | |
| | GAUAACGCCACUUAUUCAGUCCCUAUGGUCACAUCCGAG | |
| | GACGCGAACUCACCCAAUGUUACCGUUACCGCAUUCUGG | |
| | GCAUGGCCCAAUAAUACGGAAACAGACUUCAAAUGUAAG | |
| | UGGACCCUGACCAGUGGCACCCCUUCUGGCUGCGAAAAU | |
| | AUAAGCGGGGCAUUUGCUAGCAACAGAACAUUCGAUAUU | |
| | ACUGUGUCUGGCCUGGGGACCGCCCCCAAAACACUCAUU | |
| | AUAACGCGAACAGCUACGAACGCUACCACAACCACACAU | |
| | AAAGUGAUUUUCAGCAAGGCUCCAGAAUCAACUACAACC | |
| | AGUCCGACCCUUAAUACCACAGGCUUCGCAGACCCGAACA | |
| | CAACGACGGGACUGCCCUCCUCAACGCAUGUGCCGACUAA | |
| | UCUGACUGCUCCCGCAAGUACCGGCCCAACAGUCUCCACA | |
| | GCAGACGUCACCUCUCCGACUCCCGCCGGCACUACAUCUG | |
| | GAGCCUCACCGGUGACUCCUAGUCCUUCCCCCUGGGACAA | |
| | UGGGACCGAGUCUAAAGCCCCGGACAUGACGAGUUCUAC | |
| | CUCACCAGUUACAACCCCAACACCUAAUGCCACAAGCCCU | |
| | ACGCCAGCCGUGACCACCCCUACCCCCAAUGCCACCAGCC | |
| | CAACACCCGCUGUUACAACGCCAACCCCCAACGCUACUUC | |
| | UCCAACGCUAGGAAAAACAUCACCCACCUCAGCUGUAACC | |
| | ACCCCCACACCAAACGCUACCGGGCCAACCGUUGGCGAAA | |
| | CCUCCCCCCAGGCCAAUGCGACAAACCACACCCUUGGGGG | |
| | GACUUCUCCCACUCCUGUGGUGACUUCACAACCGAAGAA | |
| | CGCGACGUCGGCCGUUACGACCGGGCAGCACAAUAUCACC | |
| | UCGUCCUCCACGUCGUCCAUGUCCUUGCGGCCUUCCAGUA | |
| | ACCCAGAGACACUGUCUCCUAGUACCAGUGACAACAGCA | |
| | CCUCUCACAUGCCAUUACUGACUUCCGCCCACCCAACCGG | |
| | CGGAGAGAACAUCACUCAGGUGACCCCCGCAUCUAUUUC | |
| | UACCCACCACGUGAGCACUAGCAGCCCGGCACCAAGACCA | |
| | GGGACCACCUCCCAGGCUAGCGGCCCGGGCAACUCCUCCA | |
| | CUAGCACGAAACCAGGAGAGGUGAACGUGACCAAGGGCA | |
| | CACCGCCACAGAAUGCAACUUCCCCACAGGCCCCCUCCGG | |
| | CCAGAAAACUGCUGUACCUACGGUCACUAGCACUGGCGG | |
| | AAAAGCGAAUUCAACCACCGGUGGUAAGCAUACCACCGG | |
| | ACACGGCGCUCGGACUAGCACAGAGCCAACCACUGAUUA | |
| | CGGGGGUGACUCAACGACCCCGAGGCCCAGGUACAACGC | |
| | AACCACCUAUCUCCCACCAUCCACAUCUUCCAAGCUCAGG | |
| | CCUCGUUGGACUUUCACCUCCCCGCCUGUGACUACAGCGC | |
| | AGGCCACAGUGCCAGUGCCUCCAACGUCACAGCCGCGGUU | |
| | UAGCAAUCUCUCCAUGCUGGUCCUGCAGUGGGCAUCUCU | |
| | GGCAGUCCUGACACUGCUUCUUUUGCUCGUGAUGGCCGA | |
| | UUGUGCGUUUAGACGCAACCUUUCAACAUCCCACACAUA | |
| | UACAACUCCACCCUAUGAUGACGCAGAGACUUAUGUG | |
| 3′ UTR | UGAUAAUAGGCUGGAGCCUCGGUGGCCAUGCUUCUUGCC | 3 |
| | CCUUGGGCCUCCCCCCAGCCCCUCCUCCCCUUCCUGCACC | |
| | CGUACCCCCGUGGUCUUUGAAUAAAGUCUGAGUGGGCGG | |
| | C | |
| Corresponding | MEAALLVCQYTIQSLIHLTGEDPGFFNVEIPEFPFYPTCNVCTA | 28 |
| amino acid | DVNVTINFDVGGKKHQLDLDFGQLTPHTKAVYQPRGAFGGS | |
| sequence | ENATNLFLLELLGAGELALTMRSKKLPINVTTGEEQQVSLESV | |
| | DVYFQDVFGTMWCHHAEMQNPVYLIPETVPYIKWDNCNSTN | |
| | ITAVVRAQGLDVTLPLSLPTSAQDSNFSVKTEMLGNEIDIECIM | |
| | EDGEISQVLPGDNKFNITCSGYESHVPSGGILTSTSPVATPIPGT | |
| | GYAYSLRLTPRPVSRFLGNNSILYVFYSGNGPKASGGDYCIQS | |
| | NIVFSDEIPASQDMPTNTTDITYVGDNATYSVPMVTSEDANSP | |
| | NVTVTAFWAWPNNTETDFKCKWTLTSGTPSGCENISGAFASN | |
| | RTFDITVSGLGTAPKTLIITRTATNATTTTHKVIFSKAPESTTTS | |
| | PTLNTTGFADPNTTTGLPSSTHVPTNLTAPASTGPTVSTADVTS | |
| | PTPAGTTSGASPVTPSPSPWDNGTESKAPDMTSSTSPVTTPTPN | |
| | ATSPTPAVTTPTPNATSPTPAVTTPTPNATSPTLGKTSPTSAVT | |
| | TPTPNATGPTVGETSPQANATNHTLGGTSPTPVVTSQPKNATS | |
| | AVTTGQHNITSSSTSSMSLRPSSNPETLSPSTSDNSTSHMPLLTS | |
| | AHPTGGENITQVTPASISTHHVSTSSPAPRPGTTSQASGPGNSS | |
| | TSTKPGEVNVTKGTPPQNATSPQAPSGQKTAVPTVTSTGGKA | |
| | NSTTGGKHTTGHGARTSTEPTTDYGGDSTTPRPRYNATTYLPP | |
| | STSSKLRPRWTFTSPPVTTAQATVPVPPTSQPRFSNLSMLVLQ | |
| | WASLAVLTLLLLLVMADCAFRRNLSTSHTYTTPPYDDAETYV | |
| PolyA tail | 100 nt | |

gp350_mod_004

| SEQ ID NO: 153 consists of from 5′ end to 3′ end: | | 153 |
|---|---|---|
| 5′ UTR SEQ ID NO: 1, mRNA ORF SEQ ID NO: 31, and | | |
| 3′ UTR SEQ ID NO: 3 | | |
| Chemistry | 1-methylpseudouridine | |
| Cap | 7mG(5′)ppp(5′)NlmpNp | |
| 5′ UTR | GGGAAAUAAGAGAGAAAAGAAGAGUAAGAAGAAAUAUA | 1 |
| | AGAGCCACC | |
| ORF of mRNA | AUGGAAGCCGCCCUAUUAGUCUGCCAGUACACCAUUCAA | 31 |
| Construct | AGCCUCAUCCACUUGACUGGGGAGGAUCCUGGGUUCUUU | |
| (excluding | AACGUGGAAAUCCCGGAAUUCCCUUUCUACCCAACUUGC | |
| the stop | AACGUGUGCACGGCUGACGUCAACGUGACUAUCAACUUC | |
| codon) | GAUGUGGGGGGGAAGAAACAUCAACUUGAUCUGGACUUU | |
| | GGCCAGCUUACUCCCCACACCAAGGCCGUGUACCAGCCCC | |
| | GCGGCGCAUUCGGUGGGAGCGAGAACGCGACAAAUCUAU | |
| | UCUUGCUGGAACUGCUGGGCGCAGGAGAGCUCGCCCUGA | |
| | CGAUGCGAUCUAAAAAGCUUCCCAUCAACGUUACCACUG | |
| | GCGAGGAGCAGCAGGUGUCCCUCGAAAGCGUCGACGUCU | |
| | AUUUCCAAGACGUCUUCGGAACAAUGUGGUGCCACCACG | |
| | CUGAGAUGCAGAACCCCGUAUAUCUUAUUCCCGAAACCG | |
| | UGCCAUACAUCAAGUGGGACAACUGCAACUCAACUAACA | |
| | UCACUGCAGUAGUGCGCGCCCAGGGACUGGACGUCACUU | |
| | UGCCACUGUCACUGCCCACAUCAGCCCAAGACAGCAACUU | |
| | CAGCGUCAAGACAGAAAUGCUGGGCAACGAAAUCGACAU | |
| | CGAAUGCAUAAUGGAGGAUGGGGAAAUUUCCCAGGUCCU | |
| | CCCCGGUGAUAACAAGUUUAAUAUUACUUGUUCUGGAUA | |
| | UGAAUCCCAUGUGCCGUCUGGUGGUAUACUGACGAGUAC | |
| | AUCGCCAGUGGCUACCCCAAUCCCCGGGACAGGCUAUGCC | |
| | UACAGCCUGAGACUGACGCCAAGACCAGUUUCCAGGUUU | |
| | CUGGGGAAUAACUCUAUCCUGUAUGUGUUUUAUUCUGGU | |
| | AACGGACCCAAGGCAUCCGGCGGUGAUUAUUGUAUCCAG | |
| | AGCAAUAUAGUGUUCUCUGAUGAGAUUCCGGCCUCCCAG | |
| | GAUAUGCCAACCAACACGACAGAUAUCACCUAUGUCGGG | |
| | GACAACGCCACAUAUAGCGUGCCAAUGGUGACCAGCGAA | |
| | GAUGCCAAUUCUCCCAACGUCACAGUGACAGCCUUUUGG | |
| | GCGUGGCCUAAUAACACAGAAACUGACUUUAAAUGCAAA | |
| | UGGACUCUAACCUCAGGCACCCCAUCUGGCUGCGAGAAC | |
| | AUAAGCGGCGCGUUUGCAUCGAACAGAACUUUUGAUAUU | |
| | ACAGUAUCUGGGUUGGGCACUGCCCCCAAAACUCUAAUA | |
| | AUUACACGGACGGCCACUAACGCCACCACGACGACUCACA | |
| | AGGUGAUCUUCAGCAAAGCUCCCGAAUCUACUACUACCU | |
| | CGCCGACACUGAAUACGACAGGAUUCGCCGACCCAAAUA | |
| | CUACGACCGGCCUUCCCAGCUCGACACAUGUGCCUACAAA | |
| | CUUAACGGCCCCCGCCAGUACCGGCCCCACCGUGAGCACC | |
| | GCUGACGUCACCUCUCCUACCCCUGCCGGGACUACAAGUG | |
| | GUGCUUCCCCAGUUACUCCCAGCCCUAGCCCUUGGGACAA | |
| | CGGCACUGAGAGCAAAGCUCCGGACAUGACCAGCAGUAC | |
| | CAGUCCAGUGACAACUCCGACACCCAAUGCGACGUCCCCA | |
| | ACUCCCGCCGUGACCACGCCAACACCAAAUGCCACGUCAC | |
| | CUACUCCAGCGGUCACCACCCCAACGCCAAACGCUACUAG | |
| | UCCCACUCUAGGCAAGACAUCUCCCACCUCCGCUGUCACC | |
| | ACCCCUACACCCAAUGCUACCGGUCCCACGGUGGGUGAGA | |
| | CUAGCCCACAGGCCAACGCAACUAAUCAUACAUUGGGGG | |
| | GCACAAGCCCAACCCCCGUCGUCACUAGCCAGCCUAAAAA | |
| | CGCCACAAGCGCUGUAACUACCGGCCAGCACAAUAUAAC | |
| | AAGUUCCAGUACUAGCAGUAUGUCUCUGAGACCCAGCUC | |
| | AAAUCCUGAAACCCUCUCCCCCUCUACGUCGGAUAACUCC | |
| | ACGUCCCACAUGCCUCUACUCACAAGCGCGCACCCUACCG | |
| | GGGGAGAAAAUAUCACUCAGGUUACCCCAGCUUCUAUCU | |
| | CGACUCACCAUGUCUCUACUUCUUCCCCAGCGCCACGGCC | |
| | CGGCACUACCAGCCAGGCUAGCGGGCCAGGUAAUUCCUCC | |
| | ACUAGCACUAAACCUGGCGAAGUCAACGUUACCAAGGGA | |
| | ACACCCCCCCAGAAUGCAACCUCCCCCCAAGCUCCCUCUG | |
| | GACAGAAAACAGCCGUCCCUACCGUCACAAGCACCGGUG | |
| | GGAAGGCGAAUUCUACGACAGGCGGGAAGCACACUACCG | |
| | GACACGGAGCAAGGACAUCCACUGAGCCCACGACCGACU | |
| | ACGGUGGCGACUCCACCACCCCCAGACCCAGGUACAAUGC | |
| | GACUACCUACCUGCCCCCUUCCACUUCCAGCAAACUGAGG | |
| | CCUCGUUGGACUUUCACUUCUCCCCCAGUCACCACCGCUC | |
| | AGGCUACCGUGCCUGUCCCGCCGACCUCUCAGCCCCGGUU | |
| | UUCAAAUUUGAGUAUGCUCGUGCUGCAGUGGGCCAGCCU | |
| | GGCAGUGCUUACCCUCCUGCUCUUGCUGGUUAUGGCUGA | |
| | CUGCGCCUUCCGACGUAACUUAUCCACCAGUCAUACUUAC | |
| | ACUACACCCCCUUAUGACGACGCGGAGACCUACGUG | |
| 3′ UTR | UGAUAAUAGGCUGGAGCCUCGGUGGCCAUGCUUCUUGCC | 3 |
| | CCUUGGGCCUCCCCCCAGCCCCUCCUCCCCUUCCUGCACC | |
| | CGUACCCCCGUGGUCUUUGAAUAAAGUCUGAGUGGGCGG | |
| | C | |
| Corresponding | MEAALLVCQYTIQSLIHLTGEDPGFFNVEIPEFPFYPTCNVCTA | 28 |
| amino acid | DVNVTINFDVGGKKHQLDLDFGQLTPHTKAVYQPRGAFGGS | |
| sequence | ENATNLFLLELLGAGELALTMRSKKLPINVTTGEEQQVSLESV | |
| | DVYFQDVFGTMWCHHAEMQNPVYLIPETVPYIKWDNCNSTN | |
| | ITAVVRAQGLDVTLPLSLPTSAQDSNFSVKTEMLGNEIDIECIM | |
| | EDGEISQVLPGDNKFNITCSGYESHVPSGGILTSTSPVATPIPGT | |
| | GYAYSLRLTPRPVSRFLGNNSILYVFYSGNGPKASGGDYCIQS | |
| | NIVFSDEIPASQDMPTNTTDITYVGDNATYSVPMVTSEDANSP | |
| | NVTVTAFWAWPNNTETDFKCKWTLTSGTPSGCENISGAFASN | |
| | RTFDITVSGLGTAPKTLIITRTATNATTTTHKVIFSKAPESTTTS | |
| | PTLNTTGFADPNTTTGLPSSTHVPTNLTAPASTGPTVSTADVTS | |
| | PTPAGTTSGASPVTPSPSPWDNGTESKAPDMTSSTSPVTTPTPN | |
| | ATSPTPAVTTPTPNATSPTPAVTTPTPNATSPTLGKTSPTSAVT | |
| | TPTPNATGPTVGETSPQANATNHTLGGTSPTPVVTSQPKNATS | |
| | AVTTGQHNITSSSTSSMSLRPSSNPETLSPSTSDNSTSHMPLLTS | |
| | AHPTGGENITQVTPASISTHHVSTSSPAPRPGTTSQASGPGNSS | |
| | TSTKPGEVNVTKGTPPQNATSPQAPSGQKTAVPTVTSTGGKA | |
| | NSTTGGKHTTGHGARTSTEPTTDYGGDSTTPRPRYNATTYLPP | |
| | STSSKLRPRWTFTSPPVTTAQATVPVPPTSQPRFSNLSMLVLQ | |
| | WASLAVLTLLLLLVMADCAFRRNLSTSHTYTTPPYDDAETYV | |
| PolyA tail | 100 nt | |

gp350_mod_005

| SEQ ID NO: 154 consists of from 5′ end to 3′ end: | | 154 |
|---|---|---|
| 5′ UTR SEQ ID NO: 1, mRNA ORF SEQ ID NO: 32, and | | |
| 3′ UTR SEQ ID NO: 3 | | |
| Chemistry | 1-methylpseudouridine | |
| Cap | 7mG(5′)ppp(5′)NlmpNp | |
| 5′ UTR | GGGAAAUAAGAGAGAAAAGAAGAGUAAGAAGAAAUAUA | 1 |
| | AGAGCCACC | |
| ORF of mRNA | AUGGAAGCCGCCUUACUGGUCUGCCAGUACACUAUUCAG | 32 |
| Construct | UCCCUCAUCCAUCUCACAGGCGAGGACCCGGGGUUCUUCA | |
| (excluding | ACGUCGAAAUCCCCGAAUUCCCAUUCUAUCCCACCUGUAA | |
| the stop | CGUCUGCACAGCCGACGUUAACGUUACAAUCAAUUUCGA | |
| codon) | CGUGGGCGGGAAAAAACACCAGCUGGACCUCGACUUUGG | |
| | GCAGCUGACGCCCCACACUAAAGCCGUUUACCAGCCCAGG | |
| | GGUGCAUUCGGUGGAUCUGAAAAUGCUACAAACCUCUUU | |
| | CUGCUUGAGCUGCUUGGUGCUGGAGAGCUGGCCCUGACA | |
| | AUGCGCAGCAAAAAGUUGCCAAUCAAUGUGACCACAGGU | |
| | GAAGAACAGCAGGUGUCCCUAGAAUCCGUGGAUGUGUAC | |
| | UUCCAGGACGUUUUCGGCACAAUGUGGUGCCAUCACGCA | |
| | GAGAUGCAAAAUCCGGUGUACCUUAUCCCCGAAACAGUG | |
| | CCGUACAUUAAAUGGGAUAAUUGUAACUCCACAAACAUC | |
| | ACGGCAGUGGUGCGCGCUCAGGGGCUGGACGUGACACUC | |
| | CCCCUUUCCUUACCAACAAGUGCUCAAGAUUCCAACUUU | |
| | UCUGUGAAAACCGAGAUGCUGGGCAACGAGAUUGAUAUU | |
| | GAAUGCAUCAUGGAGGAUGGCGAGAUUAGCCAGGUGUUG | |
| | CCCGGCGACAAUAAAUUUAAUAUUACCUGUUCCGGCUAU | |
| | GAGUCACACGUGCCAAGUGGAGGCAUUCUCACGAGCACC | |
| | UCUCCCGUUGCAACACCCAUUCCUGGGACAGGGUACGCA | |
| | UAUAGUCUCAGGCUGACACCGAGACCGGUAUCGCGCUUC | |
| | UUAGGUAACAAUUCCAUCUUGUAUGUGUUUUACAGCGGA | |
| | AACGGGCCAAAGGCCUCAGGAGGAGACUACUGCAUCCAG | |
| | AGCAAUAUAGUUUUUAGCGACGAGAUCCCUGCCUCACAA | |
| | GACAUGCCCACCAACACCACCGACAUCACGUACGUCGGUG | |
| | AUAAUGCCACUUACAGCGUGCCUAUGGUGACCUCUGAAG | |
| | ACGCAAAUUCACCCAAUGUCACGGUUACCGCAUUCUGGG | |
| | CUUGGCCAAAUAACACUGAAACCGACUUCAAGUGUAAAU | |
| | GGACCCUAACCAGCGGCACCCCAUCAGGGUGCGAGAAUA | |
| | UCAGCGGGGCCUUCGCCAGCAACCGGACAUUCGACAUCAC | |
| | CGUGUCAGGACUAGGGACUGCUCCAAAAACAUUAAUUAU | |
| | UACACGGACAGCAACUAACGCUACGACUACGACUCACAA | |
| | AGUGAUAUUUAGCAAAGCCCCCGAAUCGACUACUACGAG | |
| | CCCGACCCUAAACACCACCGGUUUCGCCGAUCCCAACACA | |
| | ACUACUGGUCUCCCAUCUUCGACCCAUGUUCCAACGAAUC | |
| | UGACAGCUCCAGCAAGUACGGGGCCCACUGUGAGUACAG | |
| | CCGACGUUACUAGCCCAACUCCCGCGGGUACGACUAGUG | |
| | GCGCGUCUCCAGUGACCCCUUCGCCUUCUCCGUGGGAUAA | |
| | UGGAACCGAGUCAAAGGCUCCUGAUAUGACCAGCUCCAC | |
| | CAGUCCCGUUACAACGCCAACCCCCAAUGCAACGAGUCCA | |
| | ACUCCGGCGGUUACCACUCCGACACCAAACGCCACCUCCC | |
| | CCACGCCUGCAGUUACUACGCCCACCCCUAAUGCUACGUC | |
| | ACCCACUCUGGGAAAGACCUCACCAACCUCUGCCGUGACU | |
| | ACUCCUACACCUAAUGCCACAGGACCCACAGUUGGGGAA | |
| | ACCAGCCCACAGGCUAACGCAACUAAUCAUACGCUUGGG | |
| | GGGACCUCUCCCACGCCCGUGGUCACUUCACAGCCUAAGA | |
| | AUGCCACAAGCGCUGUGACUACAGGCCAGCAUAAUAUAA | |
| | CCAGCAGUUCAACCAGUAGCAUGUCCCUGCGUCCUUCAUC | |
| | CAAUCCUGAGACUCUGAGCCCCAGCACUAGUGACAACUC | |
| | AACUUCUCACAUGCCGUUGCUGACCUCCGCGCAUCCCACG | |
| | GGCGGUGAGAAUAUCACACAGGUGACACCCGCGUCUAUU | |
| | AGCACACAUCACGUGAGUACGUCCUCCCCCGCACCCCGCC | |
| | CAGGCACAACCUCACAAGCAUCAGGUCCGGGGAACAGCA | |
| | GCACAAGUACCAAGCCUGGCGAAGUGAAUGUAACCAAGG | |
| | GCACGCCCCCGCAGAACGCCACAUCCCCUCAAGCCCCAUC | |
| | CGGCCAGAAGACCGCUGUACCCACCGUGACAUCAACUGG | |
| | GGGGAAAGCGAACUCAACUACCGGGGGGAAGCAUACAAC | |
| | AGGGCACGGUGCCAGAACUUCUACAGAGCCAACCACGGA | |
| | CUACGGAGGGGACAGCACAACGCCCAGACCGCGGUACAA | |
| | UGCGACCACAUACCUGCCUCCCUCAACUUCGAGUAAGCUG | |
| | CGACCCAGAUGGACCUUUACUUCUCCCCCUGUCACCACCG | |
| | CUCAAGCCACCGUCCCGGUUCCACCUACUUCCCAGCCUAG | |
| | AUUCUCCAAUCUGAGCAUGCUUGUCCUACAGUGGGCAUC | |
| | ACUCGCGGUACUAACCUUGCUGCUACUGUUGGUGAUGGC | |
| | GGACUGCGCGUUUCGCCGCAACUUAUCCACCUCCCACACG | |
| | UACACAACACCUCCCUAUGAUGACGCUGAGACUUACGUC | |
| 3′UTR | UGAUAAUAGGCUGGAGCCUCGGUGGCCAUGCUUCUUGCC | 3 |
| | CCUUGGGCCUCCCCCCAGCCCCUCCUCCCCUUCCUGCACC | |
| | CGUACCCCCGUGGUCUUUGAAUAAAGUCUGAGUGGGCGG | |
| | C | |
| Corresponding | MEAALLVCQYTIQSLIHLTGEDPGFFNVEIPEFPFYPTCNVCTA | 28 |
| amino acid | DVNVTINFDVGGKKHQLDLDFGQLTPHTKAVYQPRGAFGGS | |
| sequence | ENATNLFLLELLGAGELALTMRSKKLPINVTTGEEQQVSLESV | |
| | DVYFQDVFGTMWCHHAEMQNPVYLIPETVPYIKWDNCNSTN | |
| | ITAVVRAQGLDVTLPLSLPTSAQDSNFSVKTEMLGNEIDIECIM | |
| | EDGEISQVLPGDNKFNITCSGYESHVPSGGILTSTSPVATPIPGT | |
| | GYAYSLRLTPRPVSRFLGNNSILYVFYSGNGPKASGGDYCIQS | |
| | NIVFSDEIPASQDMPTNTTDITYVGDNATYSVPMVTSEDANSP | |
| | NVTVTAFWAWPNNTETDFKCKWTLTSGTPSGCENISGAFASN | |
| | RTFDITVSGLGTAPKTLIITRTATNATTTTHKVIFSKAPESTTTS | |
| | PTLNTTGFADPNTTTGLPSSTHVPTNLTAPASTGPTVSTADVTS | |
| | PTPAGTTSGASPVTPSPSPWDNGTESKAPDMTSSTSPVTTPTPN | |
| | ATSPTPAVTTPTPNATSPTPAVTTPTPNATSPTLGKTSPTSAVT | |
| | TPTPNATGPTVGETSPQANATNHTLGGTSPTPVVTSQPKNATS | |
| | AVTTGQHNITSSSTSSMSLRPSSNPETLSPSTSDNSTSHMPLLTS | |
| | AHPTGGENITQVTPASISTHHVSTSSPAPRPGTTSQASGPGNSS | |
| | TSTKPGEVNVTKGTPPQNATSPQAPSGQKTAVPTVTSTGGKA | |
| | NSTTGGKHTTGHGARTSTEPTTDYGGDSTTPRPRYNATTYLPP | |
| | STSSKLRPRWTFTSPPVTTAQATVPVPPTSQPRFSNLSMLVLQ | |
| | WASLAVLTLLLLLVMADCAFRRNLSTSHTYTTPPYDDAETYV | |
| PolyA tail | 100 nt | |

EBV gp42 (B95-8)_DX

| SEQ ID NO: 155 consists of from 5′ end to 3′ end: | | 155 |
|---|---|---|
| 5′ UTR SEQ ID NO: 1, mRNA ORF SEQ ID NO: 33, and | | |
| 3′ UTR SEQ ID NO: 3 | | |
| Chemistry | 1-methylpseudouridine | |
| Cap | 7mG(5′)ppp(5′)NlmpNp | |
| 5′ UTR | GGGAAAUAAGAGAGAAAAGAAGAGUAAGAAGAAAUAUA | 1 |
| | AGAGCCACC | |
| ORF of mRNA | AUGGUGAGCUUCAAGCAGGUGAGAGUGCCCCUGUUCACC | 33 |
| Construct | GCCAUCGCCCUGGUGAUCGUGCUGCUGCUGGCCUACUUCC | |
| (excluding | UGCCCCCCAGAGUGAGAGGCGGCGGCAGAGUGGCCGCCG | |
| the stop | CCGCCAUCACCUGGGUGCCCAAGCCCAACGUGGAGGUGU | |
| codon) | GGCCCGUGGACCCCCCACCCCCCGUGAACUUCAACAAGAC | |
| | CGCCGAGCAGGAGUACGGCGACAAGGAGGUGAAGCUGCC | |
| | CCACUGGACCCCCACCCUGCACACCUUCCAGGUGCCCCAG | |
| | AACUACACCAAGGCCAACUGCACCUACUGCAACACCAGAG | |
| | AGUACACCUUCAGCUACAAGGGCUGCUGCUUCUACUUCA | |
| | CCAAGAAGAAGCACACCUGGAACGGCUGCUUCCAGGCCU | |
| | GCGCCGAGCUGUACCCCUGCACCUACUUCUACGGCCCCAC | |
| | CCCCGACAUCCUGCCCGUGGUGACCAGAAACCUGAACGCC | |
| | AUCGAGAGCCUGUGGGUGGGCGUGUACAGAGUGGGCGAG | |
| | GGCAACUGGACCAGCCUGGACGGCGGCACCUUCAAGGUG | |
| | UACCAGAUCUUCGGCAGCCACUGCACCUACGUGAGCAAG | |
| | UUCAGCACCGUGCCCGUGAGCCACCACGAGUGCAGCUUCC | |
| | UGAAGCCCUGCCUGUGCGUGAGCCAGAGAAGCAACAGC | |
| 3′ UTR | UGAUAAUAGGCUGGAGCCUCGGUGGCCAUGCUUCUUGCC | 3 |
| | CCUUGGGCCUCCCCCCAGCCCCUCCUCCCCUUCCUGCACC | |
| | CGUACCCCCGUGGUCUUUGAAUAAAGUCUGAGUGGGCGG | |
| | C | |
| Corresponding | MVSFKQVRVPLFTAIALVIVLLLAYFLPPRVRGGGRVAAAAIT | 34 |
| amino acid | WVPKPNVEVWPVDPPPPVNFNKTAEQEYGDKEVKLPHWTPT | |
| sequence | LHTFQVPQNYTKANCTYCNTREYTFSYKGCCFYFTKKKHTW | |
| | NGCFQACAELYPCTYFYGPTPDILPVVTRNLNAIESLWVGVYR | |
| | VGEGNWTSLDGGTFKVYQIFGSHCTYVSKFSTVPVSHHECSFL | |
| | KPCLCVSQRSNS | |
| PolyA tail | 100 nt | |

EBV gL (B95-8)

| SEQ ID NO: 156 consists of from 5′ end to 3′ end: | | 156 |
|---|---|---|
| 5′ UTR SEQ ID NO: 1, mRNA ORF SEQ ID NO: 35, and | | |
| 3′ UTR SEQ ID NO: 3 | | |
| Chemistry | 1-methylpseudouridine | |
| Cap | 7mG(5′)ppp(5′)NlmpNp | |
| 5′ UTR | GGGAAAUAAGAGAGAAAAGAAGAGUAAGAAGAAAUAUA | 1 |
| | AGAGCCACC | |
| ORF of mRNA | AUGAGAGCCGUGGGCGUGUUCCUGGCCAUCUGCCUGGUG | 35 |
| Construct | ACCAUCUUCGUGCUGCCCACCUGGGGCAACUGGGCCUACC | |
| (excluding | CCUGCUGCCACGUGACCCAGCUGAGAGCCCAGCACCUGCU | |
| the stop | GGCCCUGGAGAACAUCAGCGACAUCUACCUGGUGAGCAA | |
| codon) | CCAGACCUGCGACGGCUUCAGCCUGGCCAGCCUGAACAGC | |
| | CCCAAGAACGGCAGCAACCAGCUGGUGAUCAGCAGAUGC | |
| | GCCAACGGCCUGAACGUGGUGAGCUUCUUCAUCAGCAUC | |
| | CUGAAGAGAAGCAGCAGCGCCCUGACCGGCCACCUGAGA | |
| | GAGCUGCUGACCACCCUGGAGACCCUGUACGGCAGCUUC | |
| | AGCGUGGAGGACCUGUUCGGCGCCAACCUGAACAGAUAC | |
| | GCCUGGCACAGAGGCGGC | |
| 3′ UTR | UGAUAAUAGGCUGGAGCCUCGGUGGCCAUGCUUCUUGCC | 3 |
| | CCUUGGGCCUCCCCCCAGCCCCUCCUCCCCUUCCUGCACC | |
| | CGUACCCCCGUGGUCUUUGAAUAAAGUCUGAGUGGGCGG | |
| | C | |
| Corresponding | MRAVGVFLAICLVTIFVLPTWGNWAYPCCHVTQLRAQHLLA | 36 |
| amino acid | LENISDIYLVSNQTCDGFSLASLNSPKNGSNQLVISRCANGLNV | |
| sequence | VSFFISILKRSSSALTGHLRELLTTLETLYGSFSVEDLFGANLNR | |
| | YAWHRGG | |
| PolyA tail | 100 nt | |

EBV gH (BXLF2)_RX

| SEQ ID NO: 157 consists of from 5′ end to 3′ end: | | 157 |
|---|---|---|
| 5′ UTR SEQ ID NO: 1, mRNA ORF SEQ ID NO: 37, and | | |
| 3′ UTR SEQ ID NO: 3 | | |
| Chemistry | 1-methylpseudouridine | |
| Cap | 7mG(5′)ppp(5′)NlmpNp | |
| 5′ UTR | GGGAAAUAAGAGAGAAAAGAAGAGUAAGAAGAAAUAUA | 1 |
| | AGAGCCACC | |
| ORF of mRNA | AUGCAGUUGUUGUGCGUGUUCUGCCUCGUGUUACUCUGG | 37 |
| Construct | GAGGUGGGCGCCGCCAGCCUUAGCGAGGUGAAGCUCCAC | |
| (excluding | UUGGACAUCGAGGGCCACGCCAGCCACUACACCAUCCCCU | |
| the stop | GGACCGAGCUCAUGGCCAAGGUGCCCGGCCUUAGCCCCGA | |
| codon) | GGCCCUGUGGCGGGAGGCCAACGUGACCGAGGACCUGGC | |
| | CAGCAUGCUGAACCGGUACAAGCUGAUCUACAAGACCAG | |
| | CGGCACCCUGGGCAUCGCCCUGGCCGAGCCCGUGGACAUC | |
| | CCCGCCGUUAGCGAAGGCAGCAUGCAGGUGGACGCCAGC | |
| | AAGGUGCACCCCGGCGUGAUCAGCGGCCUGAACAGCCCCG | |
| | CCUGUAUGUUGAGCGCCCCACUGGAGAAGCAGCUGUUCU | |
| | ACUACAUCGGCACCAUGCUGCCCAACACCCGGCCCCACAG | |
| | CUACGUGUUCUACCAGCUGCGGUGCCACCUGAGCUACGU | |
| | UGCCCUGAGCAUCAACGGCGACAAGUUCCAGUACACCGG | |
| | CGCCAUGACCAGCAAGUUCCUGAUGGGCACCUACAAGCG | |
| | GGUCACCGAGAAGGGCGACGAGCACGUGCUGUCACUGGU | |
| | GUUCGGCAAGACCAAGGACCUGCCCGACCUGCGGGGCCCC | |
| | UUCAGCUACCCUAGUUUGACCAGCGCCCAGAGCGGCGAC | |
| | UACAGCUUGGUGAUCGUGACCACCUUCGUGCACUACGCC | |
| | AACUUCCACAACUACUUCGUGCCCAACCUGAAGGACAUG | |
| | UUCAGCCGGGCCGUGACCAUGACUGCCGCUUCUUACGCCC | |
| | GGUACGUGCUGCAGAAGCUGGUCCUGCUGGAGAUGAAGG | |
| | GCGGCUGCCGGGAGCCCGAGCUGGACACCGAAACACUGA | |
| | CCACCAUGUUCGAGGUGAGCGUGGCCUUCUUCAAGGUGG | |
| | GUCACGCGGUGGGCGAAACCGGCAACGGCUGCGUGGACU | |
| | UACGCUGGCUGGCCAAGAGCUUCUUCGAGCUGACCGUGC | |
| | UGAAGGAUAUCAUCGGCAUCUGCUACGGCGCCACCGUGA | |
| | AGGGCAUGCAGAGCUACGGCCUGGAGCGGCUGGCCGCCA | |
| | UGCUUAUGGCAACAGUGAAGAUGGAGGAGCUGGGACACC | |
| | UGACAACAGAGAAGCAGGAGUACGCCCUGAGACUGGCCA | |
| | CAGUGGGCUACCCAAAGGCCGGCGUGUACAGUGGACUGA | |
| | UCGGCGGCGCAACCAGCGUGCUGCUAUCCGCUUACAACCG | |
| | GCACCCGCUGUUCCAGCCCCUGCACACCGUGAUGCGGGAA | |
| | ACCCUGUUCAUCGGAAGCCACGUCGUGCUGCGGGAGCUG | |
| | AGGCUGAACGUAACCACCCAGGGCCCUAAUCUGGCCCUG | |
| | UAUCAGCUCCUCAGUACCGCCCUGUGCAGCGCCCUUGAGA | |
| | UCGGCGAGGUGCUCAGAGGCCUGGCCCUCGGUACCGAGA | |
| | GCGGCCUCUUCAGCCCAUGCUACUUAAGCCUGCGGUUCG | |
| | ACCUGACCCGGGACAAGUUGCUGAGCAUGGCCCCGCAGG | |
| | AGGCCACACUGGACCAGGCAGCUGUAUCCAACGCCGUGG | |
| | ACGGCUUCCUGGGCAGACUGUCCCUGGAACGGGAGGACC | |
| | GGGACGCCUGGCACCUGCCUGCCUACAAGUGUGUGGAUC | |
| | GGCUGGACAAGGUGCUGAUGAUCAUCCCUCUGAUUAAUG | |
| | UCACCUUCAUCAUCAGCAGCGACCGGGAGGUGCGGGGAU | |
| | CCGCCCUCUACGAGGCCAGCACCACCUAUCUGAGCAGCAG | |
| | CCUGUUCCUGUCUCCUGUGAUCAUGAACAAGUGCAGCCA | |
| | GGGCGCCGUGGCCGGCGAGCCCCGGCAGAUCCCCAAGAUC | |
| | CAGAACUUCACCCGGACCCAGAAGUCUUGCAUCUUCUGC | |
| | GGCUUCGCCCUUUUGUCCUACGACGAGAAGGAGGGCUUG | |
| | GAGACUACAACCUACAUCACCAGCCAGGAGGUGCAGAAC | |
| | AGCAUCCUGUCAUCUAAUUACUUCGACUUCGACAACCUG | |
| | CACGUUCAUUACCUGCUCCUCACCACCAACGGUACCGUCA | |
| | UGGAAAUCGCCGGACUGUACGAGGAGCGGGCCCAUGUUG | |
| | UGCUGGCCAUCAUCCUGUACUUCAUCGCUUUCGCACUUG | |
| | GCAUCUUCCUGGUGCACAAGAUCGUGAUGUUCUUCCUG | |
| 3′ UTR | UGAUAAUAGGCUGGAGCCUCGGUGGCCAUGCUUCUUGCC | 3 |
| | CCUUGGGCCUCCCCCCAGCCCCUCCUCCCCUUCCUGCACC | |
| | CGUACCCCCGUGGUCUUUGAAUAAAGUCUGAGUGGGCGG | |
| | C | |
| Corresponding | MQLLCVFCLVLLWEVGAASLSEVKLHLDIEGHASHYTIPWTE | 38 |
| amino acid | LMAKVPGLSPEALWREANVTEDLASMLNRYKLIYKTSGTLGI | |
| sequence | ALAEPVDIPAVSEGSMQVDASKVHPGVISGLNSPACMLSAPLE | |
| | KQLFYYIGTMLPNTRPHSYVFYQLRCHLSYVALSINGDKFQYT | |
| | GAMTSKFLMGTYKRVTEKGDEHVLSLVFGKTKDLPDLRGPFS | |
| | YPSLTSAQSGDYSLVIVTTFVHYANFHNYFVPNLKDMFSRAV | |
| | TMTAASYARYVLQKLVLLEMKGGCREPELDTETLTTMFEVS | |
| | VAFFKVGHAVGETGNGCVDLRWLAKSFFELTVLKDIIGICYG | |
| | ATVKGMQSYGLERLAAMLMATVKMEELGHLTTEKQEYALR | |
| | LATVGYPKAGVYSGLIGGATSVLLSAYNRHPLFQPLHTVMRE | |
| | TLFIGSHVVLRELRLNVTTQGPNLALYQLLSTALCSALEIGEVL | |
| | RGLALGTESGLFSPCYLSLRFDLTRDKLLSMAPQEATLDQAA | |
| | VSNAVDGFLGRLSLEREDRDAWHLPAYKCVDRLDKVLMIIPL | |
| | INVTFIISSDREVRGSALYEASTTYLSSSLFLSPVIMNKCSQGAV | |
| | AGEPRQIPKIQNFTRTQKSCIFCGFALLSYDEKEGLETTTYITSQ | |
| | EVQNSILSSNYFDFDNLHVHYLLLTTNGTVMEIAGLYEERAH | |
| | VVLAIILYFIAFALGIFLVHKIVMFFL | |
| PolyA tail | 100 nt | |

EBV LMP1_DX (modified)

| SEQ ID NO: 158 consists of from 5′ end to 3′ end: | | 158 |
|---|---|---|
| 5′ UTR SEQ ID NO: 1, mRNA ORF SEQ ID NO: 39, and | | |
| 3′ UTR SEQ ID NO: 3 | | |
| Chemistry | 1-methylpseudouridine | |
| Cap | 7mG(5′)ppp(5′)NlmpNp | |
| 5′ UTR | GGGAAAUAAGAGAGAAAAGAAGAGUAAGAAGAAAUAUA | 1 |
| | AGAGCCACC | |
| ORF of mRNA | AUGGAACACGACCUUGAGAGGGGCCCACCGGGCCCGCGA | 39 |
| Construct | CGGCCACCUCGAGGACCUCCCCUCUCCUCUUCCCUAGGCC | |
| (excluding | UUGCUCUCCUUCUCCUCCUCUUGGCGCUACUGUUUUGGC | |
| the stop | UGUACAUCGUUAUGAGUGACUGGACUGGAGGAGCCCUCC | |
| codon) | UUGUCCUCUAUUCCUUUGCUCUCAUGCUUAUAAUUAUAA | |
| | UUUUGAUCAUCUUUAUCUUCAGAAGAGACCUUCUCUGUC | |
| | CACUUGGAGCCCUUUGUAUACUCCUACUGAUGAUCACCC | |
| | UCCUGCUCAUCGCUCUCUGGAAUUUGCACGGACAGGCAU | |
| | UGUUCCUUGGAAUUGUGCUGUUCAUCUUCGGGUGCUUAC | |
| | UUGUCUUAGGUAUCUGGAUCUACUUAUUGGAGAUGCUCU | |
| | GGCGACUUGGUGCCACCAUCUGGCAGCUUUUGGCCUUCU | |
| | UCCUAGCCUUCUUCCUAGACCUCAUCCUGCUCAUUAUUGC | |
| | UCUCUAUCUACAACAGAACUGGUGGACUCUAUUGGUUGA | |
| | UCUCCUUUGGCUCCUCCUGUUUCUGGCGAUUUUAAUCUG | |
| | GAUGUAUUACCAUGGACAACGACACAGUGAUGAACACCA | |
| | CCACGAUGACUCCCUCCCGCACCCUCAACAAGCUACCGAU | |
| | GAUUCUGGCCAUGAAUCUGACUCUAACUCCAACGAGGGC | |
| | AGACACCACCUGCUCGUGAGUGGAGCCGGCGACGGACCA | |
| | CCACUCUGCUCUCAGAACCUAGGCGCACCUGGAGGUGGU | |
| | CCUGACAAUGGCCCACAGGACCCUGACAACACGGAUGAU | |
| | AAUGGCCCACAGGACCCUGAUAACACUGAUGACAAUGGC | |
| | CCACAUGACCCGCUGCCUCAAGACCCAGACAAUACUGAUG | |
| | ACAAUGGCCCACAGGACCCUGACAACACUGAUGACAAUG | |
| | GCCCGCACGACCCGUUACCUCAUAGCCCUAGCGACUCUGC | |
| | UGGAAAUGAUGGAGGCCCUCCACAAUUGACGGAAGAGGU | |
| | UGAGAACAAAGGAGGUGACCAGGGCCCGCCUUUGAUGAC | |
| | AGACGGAGGCGGCGGUCAUAGUCAUGAUUCCGGCCAUGG | |
| | CGGCGGUGAUCCACACCUUCCUACGCUGCUGUUGGGUUC | |
| | UUCUGGUUCCGGUGGAGAUGAUGACGACCCGCACGGCCC | |
| | AGUUCAGCUAAGCUACUAUGAC | |
| 3′ UTR | UGAUAAUAGGCUGGAGCCUCGGUGGCCAUGCUUCUUGCC | 3 |
| | CCUUGGGCCUCCCCCCAGCCCCUCCUCCCCUUCCUGCACC | |
| | CGUACCCCCGUGGUCUUUGAAUAAAGUCUGAGUGGGCGG | |
| | C | |
| Corresponding | MEHDLERGPPGPRRPPRGPPLSSSLGLALLLLLLALLFWLYIV | 16 |
| amino acid | MSDWTGGALLVLYSFALMLIIIILIIFIFRRDLLCPLGALCILLLM | |
| sequence | ITLLLIALWNLHGQALFLGIVLFIFGCLLVLGIWIYLLEMLWRL | |
| | GATIWQLLAFFLAFFLDLILLIIALYLQQNWWTLLVDLLWLLL | |
| | FLAILIWMYYHGQRHSDEHHHDDSLPHPQQATDDSGHESDSN | |
| | SNEGRHHLLVSGAGDGPPLCSQNLGAPGGGPDNGPQDPDNTD | |
| | DNGPQDPDNTDDNGPHDPLPQDPDNTDDNGPQDPDNTDDNG | |
| | PHDPLPHSPSDSAGNDGGPPQLTEEVENKGGDQGPPLMTDGG | |
| | GGHSHDSGHGGGDPHLPTLLLGSSGSGGDDDDPHGPVQLSYY | |
| | D | |
| PolyA tail | 100 nt | |

EBV LMP2

| SEQ ID NO: 159 consists of from 5′ end to 3′ end: | | 159 |
|---|---|---|
| 5′ UTR SEQ ID NO: 1, mRNA ORF SEQ ID NO: 40, and | | |
| 3′ UTR SEQ ID NO: 3 | | |
| Chemistry | 1-methylpseudouridine | |
| Cap | 7mG(5′)ppp(5′)NlmpNp | |
| 5′ UTR | GGGAAAUAAGAGAGAAAAGAAGAGUAAGAAGAAAUAUA | 1 |
| | AGAGCCACC | |
| ORF of mRNA | AUGGGGUCCCUAGAAAUGGUGCCAAUGGGCGCGGGUCCU | 40 |
| Construct | CCUAGCCCCGGCGGGGAUCCGGAUGGGUACGAUGGCGGA | |
| (excluding | AACAACUCCCAAUAUCCAUCUGCUUCUGGCUCUUCUGGG | |
| the stop | AACACGCCCACCCCACCGAACGAUGAGGAACGUGAAUCU | |
| codon) | AAUGAAGAGCCACCACCGCCUUAUGAGGACCCAUAUUGG | |
| | GGCAAUGGCGACCGUCACUCGGACUAUCAACCACUAGGA | |
| | ACCCAAGAUCAAAGUCUGUACUUGGGAUUGCAACACGAC | |
| | GGGAAUGACGGGCUCCCUCCACCUCCCUACUCUCCACGGG | |
| | AUGACUCAUCUCAACACAUAUACGAAGAAGCGGGCAGAG | |
| | GAAGUAUGAAUCCAGUAUGCCUGCCUGUAAUUGUUGCGC | |
| | CCUACCUCUUUUGGCUGGCGGCUAUUGCCGCCUCGUGUU | |
| | UCACGGCCUCAGUUAGUACCGUUGUGACCGCCACCGGCU | |
| | UGGCCCUCUCACUUCUACUCUUGGCAGCAGUGGCCAGCUC | |
| | AUAUGCCGCUGCACAAAGGAAACUGCUGACACCGGUGAC | |
| | AGUGCUUACUGCGGUUGUCACUUUCUUUGCAAUUUGCCU | |
| | AACAUGGAGGAUUGAGGACCCACCUUUUAAUUCUCUUCU | |
| | GUUUGCAUUGCUGGCCGCAGCUGGCGGACUACAAGGCAU | |
| | UUACGUUCUGGUGAUGCUUGUGCUCCUGAUACUAGCGUA | |
| | CAGAAGGAGAUGGCGCCGUUUGACUGUUUGUGGCGGCAU | |
| | CAUGUUCUUGGCAUGUGUACUUGUCCUCAUCGUCGACGC | |
| | UGUUUUGCAGCUGAGUCCCCUCCUUGGAGCUGUAACUGU | |
| | GGUUUCCAUGACGCUGCUGCUACUGGCUUUCGUCCUCUG | |
| | GCUCUCUUCGCCAGGUGGCCUAGGUACUCUUGGUGCAGC | |
| | CCUUUUAACAUUGGCAGCAGCUCUGGCACUGCUAGCGUC | |
| | ACUGAUUUUGGGCACACUUAACUUGACUACAAUGUUCCU | |
| | UCUCAUGCUCCUAUGGACACUUGUGGUUCUCCUGAUUUG | |
| | CUCUUCGUGCUCUUCAUGUCCACUGAGCAAGAUCCUUCU | |
| | GGCACGACUGUUCCUAUAUGCUCUCGCACUCUUGUUGCU | |
| | AGCCUCCGCGCUAAUCGCUGGUGGCAGUAUUUUGCAAAC | |
| | AAACUUCAAGAGUUUAAGCAGCACUGAAUUUAUACCCAA | |
| | UUUGUUCUGCAUGUUAUUACUGAUUGUCGCUGGCAUACU | |
| | CUUCAUUCUUGCUAUCCUGACCGAAUGGGGCAGUGGAAA | |
| | UAGAACAUACGGUCCAGUCUUUAUGUGCCUCGGUGGCCU | |
| | GCUCACCAUGGUAGCCGGCGCUGUGUGGCUGACGGUGAU | |
| | GUCUAACACGCUUUUGUCUGCCUGGAUUCUUACAGCAGG | |
| | AUUCCUGAUUUUCCUCAUUGGCUUUGCCCUCUUUGGGGU | |
| | CAUUAGAUGCUGCCGCUACUGCUGCUACUACUGCCUUAC | |
| | ACUGGAAAGUGAGGAGCGCCCACCGACCCCAUAUCGCAA | |
| | CACUGUA | |
| 3′ UTR | UGAUAAUAGGCUGGAGCCUCGGUGGCCAUGCUUCUUGCC | 3 |
| | CCUUGGGCCUCCCCCCAGCCCCUCCUCCCCUUCCUGCACC | |
| | CGUACCCCCGUGGUCUUUGAAUAAAGUCUGAGUGGGCGG | |
| | C | |
| Corresponding | MGSLEMVPMGAGPPSPGGDPDGYDGGNNSQYPSASGSSGNT | 22 |
| amino acid | PTPPNDEERESNEEPPPPYEDPYWGNGDRHSDYQPLGTQDQSL | |
| sequence | YLGLQHDGNDGLPPPPYSPRDDSSQHIYEEAGRGSMNPVCLP | |
| | VIVAPYLFWLAAIAASCFTASVSTVVTATGLALSLLLLAAVAS | |
| | SYAAAQRKLLTPVTVLTAVVTFFAICLTWRIEDPPFNSLLFALL | |
| | AAAGGLQGIYVLVMLVLLILAYRRRWRRLTVCGGIMFLACVL | |
| | VLIVDAVLQLSPLLGAVTVVSMTLLLLAFVLWLSSPGGLGTL | |
| | GAALLTLAAALALLASLILGTLNLTTMFLLMLLWTLVVLLICS | |
| | SCSSCPLSKILLARLFLYALALLLLASALIAGGSILQTNFKSLSS | |
| | TEFIPNLFCMLLLIVAGILFILAILTEWGSGNRTYGPVFMCLGG | |
| | LLTMVAGAVWLTVMSNTLLSAWILTAGFLIFLIGFALFGVIRC | |
| | CRYCCYYCLTLESEERPPTPYRNTV | |
| PolyA tail | 100 nt | |

EBNA1_trunc_001 (modified)

| SEQ ID NO: 160 consists of from 5′ end to 3′ end: | | 160 |
|---|---|---|
| 5′ UTR SEQ ID NO: 1, mRNA ORF SEQ ID NO: 41, and | | |
| 3′ UTR SEQ ID NO: 3 | | |
| Chemistry | 1-methylpseudouridine | |
| Cap | 7mG(5′)ppp(5′)NlmpNp | |
| 5′ UTR | GGGAAAUAAGAGAGAAAAGAAGAGUAAGAAGAAAUAUA | 1 |
| | AGAGCCACC | |
| ORF of mRNA | AUGGGCAGAAGACCCUUCUUUCACCCCGUGGGAGAAGCC | 41 |
| Construct | GACUAUUUCGAGUACCACCAGGAGGGCGGUCCUGACGGC | |
| (excluding | GAGCCCGACGUGCCUCCAGGCGCCAUCGAACAGGGCCCCG | |
| the stop | CUGACGAUCCUGGCGAGGGGCCUUCCACAGGCCCUCGCGG | |
| codon) | CCAGGGAGAUGGCGGAAGGCGGAAGAAGGGCGGCUGGUU | |
| | UGGCAAGCAUAGGGGCCAGGGCGGCUCCAAUCCCAAGUU | |
| | CGAGAAUAUCGCCGAGGGGCUCCGGGCUCUGCUGGCCCG | |
| | GUCGCACGUCGAACGUACCACUGACGAGGGGACGUGGGU | |
| | GGCCGGCGUCUUUGUGUACGGAGGAUCCAAGACCUCCCU | |
| | GUACAACCUGAGAAGGGGCACCGCCCUUGCCAUCCCUCAG | |
| | UGCAGACUCACGCCCCUGAGCAGGCUCCCCUUUGGGAUG | |
| | GCUCCUGGGCCAGGCCCGCAGCCCGGGCCCCUCAGGGAAA | |
| | GCAUCGUGUGUUACUUUAUGGUGUUUCUGCAGACACACA | |
| | UCUUUGCAGAAGUUCUGAAAGAUGCAAUCAAGGAUCUGG | |
| | UGAUGACCAAGCCUGCACCUACGUGCAAUAUCAGGGUGA | |
| | CAGUAUGCUCCUUCGACGACGGUGUGGACCUCCCGCCCUG | |
| | GUUCCCACCCAUGGUCGAGGGUGCCGCCGCCGAGGGAGA | |
| | CGAUGGCGACGACGGUGAUGAGGGUGGAGACGGAGAUGA | |
| | AGGCGAGGAGGGGCAGGAG | |
| 3′ UTR | UGAUAAUAGGCUGGAGCCUCGGUGGCCAUGCUUCUUGCC | 3 |
| | CCUUGGGCCUCCCCCCAGCCCCUCCUCCCCUUCCUGCACC | |
| | CGUACCCCCGUGGUCUUUGAAUAAAGUCUGAGUGGGCGG | |
| | C | |
| Corresponding | MGRRPFFHPVGEADYFEYHQEGGPDGEPDVPPGAIEQGPADD | 10 |
| amino acid | PGEGPSTGPRGQGDGGRRKKGGWFGKHRGQGGSNPKFENIA | |
| sequence | EGLRALLARSHVERTTDEGTWVAGVFVYGGSKTSLYNLRRG | |
| | TALAIPQCRLTPLSRLPFGMAPGPGPQPGPLRESIVCYFMVFLQ | |
| | THIFAEVLKDAIKDLVMTKPAPTCNIRVTVCSFDDGVDLPPWF | |
| | PPMVEGAAAEGDDGDDGDEGGDGDEGEEGQE | |
| PolyA tail | 100 nt | |

EBV EBNA3 (B95-8)_RX

| SEQ ID NO: 161 consists of from 5′ end to 3′ end: | | 161 |
|---|---|---|
| 5′ UTR SEQ ID NO: 1, mRNA ORF SEQ ID NO: 42, and | | |
| 3′ UTR SEQ ID NO: 3 | | |
| Chemistry | 1-methylpseudouridine | |
| Cap | 7mG(5′)ppp(5′)NlmpNp | |
| 5′ UTR | GGGAAAUAAGAGAGAAAAGAAGAGUAAGAAGAAAUAUA | 1 |
| | AGAGCCACC | |
| ORF of mRNA | AUGGACAAGGACAGGCCCGGCCCUCCCGCCUUGGACGACA | 42 |
| Construct | ACAUGGAGGAGGAGGUGCCCAGCACCAGCGUGGUGCAGG | |
| (excluding | AGCAGGUGAGCGCCGGCGACUGGGAGAACGUGUUAAUCG | |
| the stop | AGUUGAGCGACAGCAGCAGCGAGAAGGAGGCCGAGGACG | |
| codon) | CCCACCUGGAGCCCGCCCAGAAGGGCACCAAGAGGAAGA | |
| | GGGUGGACCACGACGCUGGCGGAUCUGCCCCUGCCAGGCC | |
| | CAUGCUGCCACCCCAGCCCGACCUGCCCGGCAGGGAGGCC | |
| | AUCCUGAGGAGGUUCCCACUGGACCUGAGGACCCUGCUG | |
| | CAGGCCAUCGGCGCCGCCGCCACCAGGAUCGACACCAGGG | |
| | CCAUCGACCAGUUCUUCGGCAGCCAGAUCAGCAACACCGA | |
| | GAUGUACAUCAUGUACGCCAUGGCCAUCAGACAAGCAAU | |
| | UAGGGAUCGACGCAGAAAUCCUGCCAGCAGGAGGGACCA | |
| | GGCCAAGUGGAGGCUGCAGACCCUGGCCGCCGGCUGGCCC | |
| | AUGGGCUACCAGGCCUACAGCAGCUGGAUGUACAGCUAC | |
| | ACCGACCACCAGACCACUCCGACCUUCGUGCACCUCCAGG | |
| | CUACCCUGGGCUGCACUGGCGGUCGCAGGUGCCACGUGA | |
| | CCUUCUCAGCGGGCACCUUCAAGCUGCCCAGGUGCACACC | |
| | UGGCGACAGGCAGUGGCUGUACGUGCAGAGCAGCGUGGG | |
| | CAACAUUGUUCAGAGUUGCAACCCCAGGUACAGCAUCUU | |
| | CUUCGACUACAUGGCGAUUCACAGGAGCCUGACCAAGAU | |
| | CUGGGAGGAAGUCCUGACCCCUGACCAGAGGGUGAGCUU | |
| | CAUGGAGUUCCUGGGCUUCCUGCAGAGGACCGACCUGAG | |
| | CUACAUCAAGAGCUUCGUGAGCGACGCCCUGGGCACCACC | |
| | AGCAUCCAGACUCCUUGGAUCGACGAUAACCCUAGCACC | |
| | GAAACCGCCCAGGCCUGGAACGCCGGUUUCCUGAGGGGC | |
| | AGGGCCUACGGCAUCGACCUGCUCCGGACCGAGGGCGAG | |
| | CACGUGGAGGGCGCCACCGGCGAGACUAGGGAGGAGAGC | |
| | GAGGACACUGAGAGCGACGGCGACGACGAGGAUCUGCCG | |
| | UGCAUCGUGAGCAGGGGCGGCCCCAAGGUGAAGAGGCCU | |
| | CCCAUCUUCAUCCGGAGGCUUCACAGGCUGCUGCUGAUG | |
| | AGGGCCGGCAAGCGUACUGAACAGGGCAAGGAGGUACUG | |
| | GAGAAGGCCAGGGGCAGCACAUAUGGCACCCCUAGACCG | |
| | CCUGUGCCCAAGCCGCGUCCUGAAGUCCCGCAGAGUGAU | |
| | GAGACAGCGACUAGCCAUGGCAGUGCUCAGGUGCCCGAG | |
| | CCACCCACCAUCCAUCUCGCCGCACAGGGCAUGGCCUACC | |
| | CACUGCACGAGCAGCACGGCAUGGCGCCCUGCCCCGUGGC | |
| | CCAGGCUCCUCCAACCCCGCUUCCUCCAGUAUCCCCUGGU | |
| | GACCAGUUGCCAGGCGUGUUCAGCGACGGUAGGGUGGCC | |
| | UGCGCGCCAGUUCCUGCACCAGCAGGCCCAAUUGUGAGG | |
| | CCCUGGGAGCCCUCCCUAACCCAGGCGGCAGGUCAGGCCU | |
| | UCGCUCCAGUUAGACCACAGCACAUGCCCGUGGAACCGG | |
| | UGCCAGUGCCUACGGUGGCGCUGGAGAGGCCCGUGUACC | |
| | CAAAGCCUGUGCGACCUGCGCCUCCUAAGAUCGCCAUGCA | |
| | AGGCCCGGGCGAGACUAGCGGUAUCAGGCGGGCCAGGGA | |
| | GAGGUGGCGCCCGGCACCGUGGACUCCCAACCCACCAAGG | |
| | UCACCUAGUCAGAUGAGCGUGCGUGAUAGGCUGGCACGG | |
| | CUUCGGGCAGAGGCUCAGGUAAAGCAGGCCAGUGUGGAG | |
| | GUGCAGCCACCACAGCUGACUCAGGUGUCCCCGCAGCAGC | |
| | CCAUGGAGGGCCCACUGGUGCCGGAACAGCAGAUGUUCC | |
| | CCGGCGCCCCGUUCAGCCAGGUGGCCGACGUGGUUAGGG | |
| | CUCCUGGCGUGCCUGCUAUGCAGCCUCAGUACUUCGACCU | |
| | ACCGCUGAUCCAGCCCAUCAGUCAAGGUGCCCCAGUGGCC | |
| | CCACUGAGGGCUAGCAUGGGCCCGGUCCCUCCUGUUCCAG | |
| | CCACCCAGCCUCAAUAUUUCGACAUUCCUCUGACCGAGCC | |
| | UAUAAACCAGGGCGCGUCUGCGGCCCACUUCCUGCCUCAA | |
| | CAGCCAAUGGAAGGCCCGCUGGUCCCAGAACAGUGGAUG | |
| | UUCCCUGGAGCUGCCCUGAGCCAAUCAGUGAGGCCGGGA | |
| | GUUGCCCAGAGCCAGUAUUUCGAUCUCCCUUUGACACAG | |
| | CCUAUCAAUCACGGAGCACCUGCCGCUCACUUCCUUCACC | |
| | AGCCUCCGAUGGAAGGUCCUUGGGUUCCAGAGCAAUGGA | |
| | UGUUCCAAGGUGCGCCACCAUCUCAGGGCACAGACGUGG | |
| | UCCAGCAUCAGCUGGACGCGCUUGGCUACACUCUACACG | |
| | GCCUGAACCACCCGGGCGUUCCAGUGAGUCCAGCCGUGA | |
| | ACCAGUACCAUCUCUCUCAGGCUGCCUUCGGCCUGCCCAU | |
| | UGACGAGGACGAGAGCGGCGAGGGCAGCGAUACCAGCGA | |
| | GCCCUGCGAAGCCCUGGAUCUUUCCAUCCACGGCCGACCU | |
| | UGCCCACAGGCUCCAGAGUGGCCCGUACAGGAAGAAGGC | |
| | GGCCAGGACGCCACCGAGGUCCUGGACUUGUCCAUACAU | |
| | GGCAGACCGCGCCCUAGGACCCCGGAGUGGCCAGUUCAG | |
| | GGUGAAGGUGGUCAGAACGUGACCGGCCCGGAAACCCGA | |
| | AGGGUGGUCGUGUCCGCUGUUGUCCACAUGUGUCAGGAU | |
| | GACGAAUUCCCAGAUCUGCAAGAUCCACCCGACGAGGCC | |
| 3′UTR | UGAUAAUAGGCUGGAGCCUCGGUGGCCAUGCUUCUUGCC | 3 |
| | CCUUGGGCCUCCCCCCAGCCCCUCCUCCCCUUCCUGCACC | |
| | CGUACCCCCGUGGUCUUUGAAUAAAGUCUGAGUGGGCGG | |
| | C | |
| Corresponding | MDKDRPGPPALDDNMEEEVPSTSVVQEQVSAGDWENVLIELS | 43 |
| amino acid | DSSSEKEAEDAHLEPAQKGTKRKRVDHDAGGSAPARPMLPPQ | |
| sequence | PDLPGREAILRRFPLDLRTLLQAIGAAATRIDTRAIDQFFGSQIS | |
| | NTEMYIMYAMAIRQAIRDRRRNPASRRDQAKWRLQTLAAGW | |
| | PMGYQAYSSWMYSYTDHQTTPTFVHLQATLGCTGGRRCHVT | |
| | FSAGTFKLPRCTPGDRQWLYVQSSVGNIVQSCNPRYSIFFDYM | |
| | AIHRSLTKIWEEVLTPDQRVSFMEFLGFLQRTDLSYIKSFVSDA | |
| | LGTTSIQTPWIDDNPSTETAQAWNAGFLRGRAYGIDLLRTEGE | |
| | HVEGATGETREESEDTESDGDDEDLPCIVSRGGPKVKRPPIFIR | |
| | RLHRLLLMRAGKRTEQGKEVLEKARGSTYGTPRPPVPKPRPE | |
| | VPQSDETATSHGSAQVPEPPTIHLAAQGMAYPLHEQHGMAPC | |
| | PVAQAPPTPLPPVSPGDQLPGVFSDGRVACAPVPAPAGPIVRP | |
| | WEPSLTQAAGQAFAPVRPQHMPVEPVPVPTVALERPVYPKPV | |
| | RPAPPKIAMQGPGETSGIRRARERWRPAPWTPNPPRSPSQMSV | |
| | RDRLARLRAEAQVKQASVEVQPPQLTQVSPQQPMEGPLVPEQ | |
| | QMFPGAPFSQVADVVRAPGVPAMQPQYFDLPLIQPISQGAPV | |
| | APLRASMGPVPPVPATQPQYFDIPLTEPINQGASAAHFLPQQP | |
| | MEGPLVPEQWMFPGAALSQSVRPGVAQSQYFDLPLTQPINHG | |
| | APAAHFLHQPPMEGPWVPEQWMFQGAPPSQGTDVVQHQLD | |
| | ALGYTLHGLNHPGVPVSPAVNQYHLSQAAFGLPIDEDESGEG | |
| | SDTSEPCEALDLSIHGRPCPQAPEWPVQEEGGQDATEVLDLSI | |
| | HGRPRPRTPEWPVQGEGGQNVTGPETRRVVVSAVVHMCQDD | |
| | EFPDLQDPPDEA | |
| PolyA tail | 100 nt | |

EBV gp350 A44Y V10 Stab

| SEQ ID NO: 162 consists of from 5′ end to 3′ end: | | 162 |
|---|---|---|
| 5′ UTR SEQ ID NO: 1, mRNA ORF SEQ ID NO: 44, and | | |
| 3′ UTR SEQ ID NO: 3 | | |
| Chemistry | 1-methylpseudouridine | |
| Cap | 7mG(5′)ppp(5′)NlmpNp | |
| 5′ UTR | GGGAAAUAAGAGAGAAAAGAAGAGUAAGAAGAAAUAUA | 1 |
| | AGAGCCACC | |
| ORF of mRNA | AUGGAGGCAGCACUGCUGGUCUGCCAGUAUACAAUCCAG | 44 |
| Construct | UCGCUCAUUCAUCUGACAGGCGAGGACCCCGGCUUCUUU | |
| (excluding | AACGUGGAAAUCCCAGAGUUCCCUUUCUAUCCAACCUGU | |
| the stop | AACGUUUGCACUUACGACGUGAACGUGACAAUCAAUUUC | |
| codon) | GACGUGGGAGGAAAGAAGCAUCAGCUUGAUCUGGAUUUC | |
| | GGCCAACUGACGCCACACACCAAAGCGGUGUACCAACCAA | |
| | GGGGUGCAUUUGGAGGGAGCGAGAAUGCUACAAAUCUGU | |
| | UCUUACUGGAACUGCUUGGUGCAGGAGAGCUGGCACUAA | |
| | CCAUGCGAAGCAAGAAGCUCCCCAUCAACGUUACCACCGG | |
| | GGAAGAACAGCAAGUCAGCCUUGAAUCCGUGGAUGUGUA | |
| | CUUUCAGGAUGUUUUCGGCACCAUGUGGUGUCACCACGC | |
| | UGAGAUGCAGAAUCCCGUGUAUCUCAUACCCGAGACUGU | |
| | ACCCUACAUCAAGUGGGAUAAUUGCAAUUCAACUAAUAU | |
| | UACGGCUGUGGUGAGGGCCCAGGGCUUGGACGUGACUCU | |
| | GCCCUUAUCUCUACCUACUUCUGCCCAAGACUCCAAUUUC | |
| | UCUGUCAAGACCGAGAUGCUCGGGAAUGAGAUCGAUAUC | |
| | GAGUGCAUCAUGGAGGACGGUGAGAUAAGCCAGGUUCUG | |
| | CCCGGCGACAACAAGUUCAAUAUCACUUGUUCUGGCUAC | |
| | GAGUCCCAUGUGCCUAGUGGUGGCAUACUCACAAGUACU | |
| | UCUCCCGUAGCCACGCCCAUUCCCGGAACCGGAUACGCCU | |
| | ACAGUCUGCGUCUGACCCCACGGCCUGUGUCCAGAUUCCU | |
| | GGGUAACAAUAGUAUCUUAUACGUGUUUUAUAGCGGAAA | |
| | CGGCCCUAAAGCGUCCGGAGGGGACUAUUGUAUUCAGAG | |
| | UAAUAUCGUUUUCUCUGAUGAGAUUCCUGCCAGUCAGGA | |
| | CAUGCCGACAAACACAACUGAUAUUACCUACGUGGGCGA | |
| | CAAUGCCACGUAUUCAGUGCCCAUGGUCACGAGCGAGGA | |
| | CGCCAAUUCACCAAAUGUUACUGUAACAGCUUUCUGGGC | |
| | CUGGCCAAAUAACACUGAGACUGACUUCAAAUGUAAGUG | |
| | GACUUUGACCUCUGGAACUCCGUCGGGUUGCGAGAAUAU | |
| | CAGCGGGGCCUUUGCUUCCAACAGGACUUUCGACAUCAC | |
| | UGUCUCAGGGCUGGGGACAGCACCGAAGACAUUAAUCAU | |
| | AACACGGACCGCCACCAACGCCACGACUACAACCCAUAAG | |
| | GUGAUCUUUUCCAAGGCACCUGAGUCCACCACUACCUCCC | |
| | CGACUCUUAACACUACGGGCUUCGCUGAUCCCAACACCAC | |
| | UACGGGGUUGCCUAGCUCGACACAUGUGCCGACGAACCU | |
| | GACUGCCCCUGCAUCGACCGGGCCCACAGUUUCGACCGCC | |
| | GAUGUGACAUCACCAACGCCCGCAGGUACAACCUCAGGC | |
| | GCCAGCCCAGUGACCCCUUCCCCAAGCCCCUGGGAUAAUG | |
| | GAACGGAGUCCAAGGCUCCUGAUAUGACUUCCUCUACCA | |
| | GCCCCGUGACUACACCCACUCCCAACGCAACUAGCCCAAC | |
| | CCCAGCUGUGACGACGCCCACCCCGAACGCGACAUCUCCC | |
| | ACACCUGCUGUGACAACCCCAACCCCUAACGCCACUAGCC | |
| | CUACCCUAGGUAAGACCAGUCCGACUAGCGCCGUUACAA | |
| | CCCCUACCCCUAACGCAACCGGCCCGACCGUGGGCGAGAC | |
| | UUCCCCGCAAGCCAAUGCGACAAAUCACACAUUGGGCGG | |
| | GACCUCUCCUACACCAGUCGUUACAUCUCAGCCUAAGAAC | |
| | GCUACCUCCGCUGUCACUACCGGACAGCACAACAUCACCA | |
| | GCUCAAGCACGAGUUCCAUGAGCUUGCGGCCGAGCUCAA | |
| | AUCCCGAGACCCUAUCACCAUCCACAUCAGACAACAGUAC | |
| | UUCACACAUGCCACUCUUGACGAGCGCUCACCCCACCGGC | |
| | GGCGAGAACAUCACCCAGGUGACUCCGGCGUCUAUUUCC | |
| | ACCCACCACGUCAGCACGUCGUCUCCCGCACCGAGACCAG | |
| | GGACGACUUCUCAGGCCAGUGGGCCUGGCAACUCCUCUA | |
| | CAAGCACAAAGCCAGGCGAAGUUAACGUGACAAAGGGAA | |
| | CGCCUCCCCAGAACGCAACCAGUCCUCAGGCGCCCAGCGG | |
| | GCAGAAGACUGCGGUGCCAACUGUGACCAGCACCGGUGG | |
| | CAAGGCCAACUCAACAACUGGAGGCAAGCAUACGACGGG | |
| | GCACGGCGCCCGGACCUCCACUGAACCCACGACCGAUUAC | |
| | GGAGGUGACAGCACAACACCGCGGCCACGAUAUAAUGCC | |
| | ACCACUUAUCUGCCACCAUCCACAAGCUCCAAGCUGCGGC | |
| | CACGGUGGACCUUCACAAGCCCACCCGUGACGACUGCCCA | |
| | AGCGACGGUGCCAGUGCCACCUACAAGCCAGCCACGCUUC | |
| | UCCAACCUUAGUAUGCUCGUUCUCCAGUGGGCCAGCCUU | |
| | GCUGUUCUGACCCUCCUCCUGCUGCUCGUGAUGGCCGAU | |
| | UGCGCCUUUAGGAGAAACCUCAGCACUAGCCACACGUAC | |
| | ACCACGCCGCCCUACGAUGACGCCGAGACUUACGUC | |
| 3′ UTR | UGAUAAUAGGCUGGAGCCUCGGUGGCCAUGCUUCUUGCC | 3 |
| | CCUUGGGCCUCCCCCCAGCCCCUCCUCCCCUUCCUGCACC | |
| | CGUACCCCCGUGGUCUUUGAAUAAAGUCUGAGUGGGCGG | |
| | C | |
| Corresponding | MEAALLVCQYTIQSLIHLTGEDPGFFNVEIPEFPFYPTCNVCTY | 45 |
| amino acid | DVNVTINFDVGGKKHQLDLDFGQLTPHTKAVYQPRGAFGGS | |
| sequence | ENATNLFLLELLGAGELALTMRSKKLPINVTTGEEQQVSLESV | |
| | DVYFQDVFGTMWCHHAEMQNPVYLIPETVPYIKWDNCNSTN | |
| | ITAVVRAQGLDVTLPLSLPTSAQDSNFSVKTEMLGNEIDIECIM | |
| | EDGEISQVLPGDNKFNITCSGYESHVPSGGILTSTSPVATPIPGT | |
| | GYAYSLRLTPRPVSRFLGNNSILYVFYSGNGPKASGGDYCIQS | |
| | NIVFSDEIPASQDMPTNTTDITYVGDNATYSVPMVTSEDANSP | |
| | NVTVTAFWAWPNNTETDFKCKWTLTSGTPSGCENISGAFASN | |
| | RTFDITVSGLGTAPKTLIITRTATNATTTTHKVIFSKAPESTTTS | |
| | PTLNTTGFADPNTTTGLPSSTHVPTNLTAPASTGPTVSTADVTS | |
| | PTPAGTTSGASPVTPSPSPWDNGTESKAPDMTSSTSPVTTPTPN | |
| | ATSPTPAVTTPTPNATSPTPAVTTPTPNATSPTLGKTSPTSAVT | |
| | TPTPNATGPTVGETSPQANATNHTLGGTSPTPVVTSQPKNATS | |
| | AVTTGQHNITSSSTSSMSLRPSSNPETLSPSTSDNSTSHMPLLTS | |
| | AHPTGGENITQVTPASISTHHVSTSSPAPRPGTTSQASGPGNSS | |
| | TSTKPGEVNVTKGTPPQNATSPQAPSGQKTAVPTVTSTGGKA | |
| | NSTTGGKHTTGHGARTSTEPTTDYGGDSTTPRPRYNATTYLPP | |
| | STSSKLRPRWTFTSPPVTTAQATVPVPPTSQPRFSNLSMLVLQ | |
| | WASLAVLTLLLLLVMADCAFRRNLSTSHTYTTPPYDDAETYV | |
| PolyA tail | 100 nt | |

EBV gp350 1150F V11 Stab

| SEQ ID NO: 163 consists of from 5′ end to 3′ end: | | 163 |
|---|---|---|
| 5′ UTR SEQ ID NO: 1, mRNA ORF SEQ ID NO: 46, and | | |
| 3′ UTR SEQ ID NO: 3 | | |
| Chemistry | 1-methylpseudouridine | |
| Cap | 7mG(5′)ppp(5′)NlmpNp | |
| 5′UTR | GGGAAAUAAGAGAGAAAAGAAGAGUAAGAAGAAAUAUA | 1 |
| | AGAGCCACC | |
| ORF of mRNA | AUGGAGGCAGCACUGCUGGUCUGCCAGUAUACAAUCCAG | 46 |
| Construct | UCGCUCAUUCAUCUGACAGGCGAGGACCCCGGCUUCUUU | |
| (excluding | AACGUGGAAAUCCCAGAGUUCCCUUUCUAUCCAACCUGU | |
| the stop | AACGUUUGCACUGCUGACGUGAACGUGACAUUCAAUUUC | |
| codon) | GACGUGGGAGGAAAGAAGCAUCAGCUUGAUCUGGAUUUC | |
| | GGCCAACUGACGCCACACACCAAAGCGGUGUACCAACCAA | |
| | GGGGUGCAUUUGGAGGGAGCGAGAAUGCUACAAAUCUGU | |
| | UCUUACUGGAACUGCUUGGUGCAGGAGAGCUGGCACUAA | |
| | CCAUGCGAAGCAAGAAGCUCCCCAUCAACGUUACCACCGG | |
| | GGAAGAACAGCAAGUCAGCCUUGAAUCCGUGGAUGUGUA | |
| | CUUUCAGGAUGUUUUCGGCACCAUGUGGUGUCACCACGC | |
| | UGAGAUGCAGAAUCCCGUGUAUCUCAUACCCGAGACUGU | |
| | ACCCUACAUCAAGUGGGAUAAUUGCAAUUCAACUAAUAU | |
| | UACGGCUGUGGUGAGGGCCCAGGGCUUGGACGUGACUCU | |
| | GCCCUUAUCUCUACCUACUUCUGCCCAAGACUCCAAUUUC | |
| | UCUGUCAAGACCGAGAUGCUCGGGAAUGAGAUCGAUAUC | |
| | GAGUGCAUCAUGGAGGACGGUGAGAUAAGCCAGGUUCUG | |
| | CCCGGCGACAACAAGUUCAAUAUCACUUGUUCUGGCUAC | |
| | GAGUCCCAUGUGCCUAGUGGUGGCAUACUCACAAGUACU | |
| | UCUCCCGUAGCCACGCCCAUUCCCGGAACCGGAUACGCCU | |
| | ACAGUCUGCGUCUGACCCCACGGCCUGUGUCCAGAUUCCU | |
| | GGGUAACAAUAGUAUCUUAUACGUGUUUUAUAGCGGAAA | |
| | CGGCCCUAAAGCGUCCGGAGGGGACUAUUGUAUUCAGAG | |
| | UAAUAUCGUUUUCUCUGAUGAGAUUCCUGCCAGUCAGGA | |
| | CAUGCCGACAAACACAACUGAUAUUACCUACGUGGGCGA | |
| | CAAUGCCACGUAUUCAGUGCCCAUGGUCACGAGCGAGGA | |
| | CGCCAAUUCACCAAAUGUUACUGUAACAGCUUUCUGGGC | |
| | CUGGCCAAAUAACACUGAGACUGACUUCAAAUGUAAGUG | |
| | GACUUUGACCUCUGGAACUCCGUCGGGUUGCGAGAAUAU | |
| | CAGCGGGGCCUUUGCUUCCAACAGGACUUUCGACAUCAC | |
| | UGUCUCAGGGCUGGGGACAGCACCGAAGACAUUAAUCAU | |
| | AACACGGACCGCCACCAACGCCACGACUACAACCCAUAAG | |
| | GUGAUCUUUUCCAAGGCACCUGAGUCCACCACUACCUCCC | |
| | CGACUCUUAACACUACGGGCUUCGCUGAUCCCAACACCAC | |
| | UACGGGGUUGCCUAGCUCGACACAUGUGCCGACGAACCU | |
| | GACUGCCCCUGCAUCGACCGGGCCCACAGUUUCGACCGCC | |
| | GAUGUGACAUCACCAACGCCCGCAGGUACAACCUCAGGC | |
| | GCCAGCCCAGUGACCCCUUCCCCAAGCCCCUGGGAUAAUG | |
| | GAACGGAGUCCAAGGCUCCUGAUAUGACUUCCUCUACCA | |
| | GCCCCGUGACUACACCCACUCCCAACGCAACUAGCCCAAC | |
| | CCCAGCUGUGACGACGCCCACCCCGAACGCGACAUCUCCC | |
| | ACACCUGCUGUGACAACCCCAACCCCUAACGCCACUAGCC | |
| | CUACCCUAGGUAAGACCAGUCCGACUAGCGCCGUUACAA | |
| | CCCCUACCCCUAACGCAACCGGCCCGACCGUGGGCGAGAC | |
| | UUCCCCGCAAGCCAAUGCGACAAAUCACACAUUGGGCGG | |
| | GACCUCUCCUACACCAGUCGUUACAUCUCAGCCUAAGAAC | |
| | GCUACCUCCGCUGUCACUACCGGACAGCACAACAUCACCA | |
| | GCUCAAGCACGAGUUCCAUGAGCUUGCGGCCGAGCUCAA | |
| | AUCCCGAGACCCUAUCACCAUCCACAUCAGACAACAGUAC | |
| | UUCACACAUGCCACUCUUGACGAGCGCUCACCCCACCGGC | |
| | GGCGAGAACAUCACCCAGGUGACUCCGGCGUCUAUUUCC | |
| | ACCCACCACGUCAGCACGUCGUCUCCCGCACCGAGACCAG | |
| | GGACGACUUCUCAGGCCAGUGGGCCUGGCAACUCCUCUA | |
| | CAAGCACAAAGCCAGGCGAAGUUAACGUGACAAAGGGAA | |
| | CGCCUCCCCAGAACGCAACCAGUCCUCAGGCGCCCAGCGG | |
| | GCAGAAGACUGCGGUGCCAACUGUGACCAGCACCGGUGG | |
| | CAAGGCCAACUCAACAACUGGAGGCAAGCAUACGACGGG | |
| | GCACGGCGCCCGGACCUCCACUGAACCCACGACCGAUUAC | |
| | GGAGGUGACAGCACAACACCGCGGCCACGAUAUAAUGCC | |
| | ACCACUUAUCUGCCACCAUCCACAAGCUCCAAGCUGCGGC | |
| | CACGGUGGACCUUCACAAGCCCACCCGUGACGACUGCCCA | |
| | AGCGACGGUGCCAGUGCCACCUACAAGCCAGCCACGCUUC | |
| | UCCAACCUUAGUAUGCUCGUUCUCCAGUGGGCCAGCCUU | |
| | GCUGUUCUGACCCUCCUCCUGCUGCUCGUGAUGGCCGAU | |
| | UGCGCCUUUAGGAGAAACCUCAGCACUAGCCACACGUAC | |
| | ACCACGCCGCCCUACGAUGACGCCGAGACUUACGUC | |
| 3′ UTR | UGAUAAUAGGCUGGAGCCUCGGUGGCCAUGCUUCUUGCC | 3 |
| | CCUUGGGCCUCCCCCCAGCCCCUCCUCCCCUUCCUGCACC | |
| | CGUACCCCCGUGGUCUUUGAAUAAAGUCUGAGUGGGCGG | |
| | C | |
| Corresponding | MEAALLVCQYTIQSLIHLTGEDPGFFNVEIPEFPFYPTCNVCTA | 47 |
| amino acid | DVNVTFNFDVGGKKHQLDLDFGQLTPHTKAVYQPRGAFGGS | |
| sequence | ENATNLFLLELLGAGELALTMRSKKLPINVTTGEEQQVSLESV | |
| | DVYFQDVFGTMWCHHAEMQNPVYLIPETVPYIKWDNCNSTN | |
| | ITAVVRAQGLDVTLPLSLPTSAQDSNFSVKTEMLGNEIDIECIM | |
| | EDGEISQVLPGDNKFNITCSGYESHVPSGGILTSTSPVATPIPGT | |
| | GYAYSLRLTPRPVSRFLGNNSILYVFYSGNGPKASGGDYCIQS | |
| | NIVFSDEIPASQDMPTNTTDITYVGDNATYSVPMVTSEDANSP | |
| | NVTVTAFWAWPNNTETDFKCKWTLTSGTPSGCENISGAFASN | |
| | RTFDITVSGLGTAPKTLIITRTATNATTTTHKVIFSKAPESTTTS | |
| | PTLNTTGFADPNTTTGLPSSTHVPTNLTAPASTGPTVSTADVTS | |
| | PTPAGTTSGASPVTPSPSPWDNGTESKAPDMTSSTSPVTTPTPN | |
| | ATSPTPAVTTPTPNATSPTPAVTTPTPNATSPTLGKTSPTSAVT | |
| | TPTPNATGPTVGETSPQANATNHTLGGTSPTPVVTSQPKNATS | |
| | AVTTGQHNITSSSTSSMSLRPSSNPETLSPSTSDNSTSHMPLLTS | |
| | AHPTGGENITQVTPASISTHHVSTSSPAPRPGTTSQASGPGNSS | |
| | TSTKPGEVNVTKGTPPQNATSPQAPSGQKTAVPTVTSTGGKA | |
| | NSTTGGKHTTGHGARTSTEPTTDYGGDSTTPRPRYNATTYLPP | |
| | STSSKLRPRWTFTSPPVTTAQATVPVPPTSQPRFSNLSMLVLQ | |
| | WASLAVLTLLLLLVMADCAFRRNLSTSHTYTTPPYDDAETYV | |
| PolyA tail | 100 nt | |

EBV gp350 M2021 V12 Stab

| SEQ ID NO: 164 consists of from 5′ end to 3′ end: | | 164 |
|---|---|---|
| 5′ UTR SEQ ID NO: 1, mRNA ORF SEQ ID NO: 48, and | | |
| 3′ UTR SEQ ID NO: 3 | | |
| Chemistry | 1-methylpseudouridine | |
| Cap | 7mG(5′)ppp(5′)NlmpNp | |
| 5′ UTR | GGGAAAUAAGAGAGAAAAGAAGAGUAAGAAGAAAUAUA | 1 |
| | AGAGCCACC | |
| ORF of mRNA | AUGGAGGCAGCACUGCUGGUCUGCCAGUAUACAAUCCAG | 48 |
| Construct | UCGCUCAUUCAUCUGACAGGCGAGGACCCCGGCUUCUUU | |
| (excluding | AACGUGGAAAUCCCAGAGUUCCCUUUCUAUCCAACCUGU | |
| the stop | AACGUUUGCACUGCUGACGUGAACGUGACAAUCAAUUUC | |
| codon) | GACGUGGGAGGAAAGAAGCAUCAGCUUGAUCUGGAUUUC | |
| | GGCCAACUGACGCCACACACCAAAGCGGUGUACCAACCAA | |
| | GGGGUGCAUUUGGAGGGAGCGAGAAUGCUACAAAUCUGU | |
| | UCUUACUGGAACUGCUUGGUGCAGGAGAGCUGGCACUAA | |
| | CCAUGCGAAGCAAGAAGCUCCCCAUCAACGUUACCACCGG | |
| | GGAAGAACAGCAAGUCAGCCUUGAAUCCGUGGAUGUGUA | |
| | CUUUCAGGAUGUUUUCGGCACCAUGUGGUGUCACCACGC | |
| | UGAGAUGCAGAAUCCCGUGUAUCUCAUACCCGAGACUGU | |
| | ACCCUACAUCAAGUGGGAUAAUUGCAAUUCAACUAAUAU | |
| | UACGGCUGUGGUGAGGGCCCAGGGCUUGGACGUGACUCU | |
| | GCCCUUAUCUCUACCUACUUCUGCCCAAGACUCCAAUUUC | |
| | UCUGUCAAGACCGAGAUACUCGGGAAUGAGAUCGAUAUC | |
| | GAGUGCAUCAUGGAGGACGGUGAGAUAAGCCAGGUUCUG | |
| | CCCGGCGACAACAAGUUCAAUAUCACUUGUUCUGGCUAC | |
| | GAGUCCCAUGUGCCUAGUGGUGGCAUACUCACAAGUACU | |
| | UCUCCCGUAGCCACGCCCAUUCCCGGAACCGGAUACGCCU | |
| | ACAGUCUGCGUCUGACCCCACGGCCUGUGUCCAGAUUCCU | |
| | GGGUAACAAUAGUAUCUUAUACGUGUUUUAUAGCGGAAA | |
| | CGGCCCUAAAGCGUCCGGAGGGGACUAUUGUAUUCAGAG | |
| | UAAUAUCGUUUUCUCUGAUGAGAUUCCUGCCAGUCAGGA | |
| | CAUGCCGACAAACACAACUGAUAUUACCUACGUGGGCGA | |
| | CAAUGCCACGUAUUCAGUGCCCAUGGUCACGAGCGAGGA | |
| | CGCCAAUUCACCAAAUGUUACUGUAACAGCUUUCUGGGC | |
| | CUGGCCAAAUAACACUGAGACUGACUUCAAAUGUAAGUG | |
| | GACUUUGACCUCUGGAACUCCGUCGGGUUGCGAGAAUAU | |
| | CAGCGGGGCCUUUGCUUCCAACAGGACUUUCGACAUCAC | |
| | UGUCUCAGGGCUGGGGACAGCACCGAAGACAUUAAUCAU | |
| | AACACGGACCGCCACCAACGCCACGACUACAACCCAUAAG | |
| | GUGAUCUUUUCCAAGGCACCUGAGUCCACCACUACCUCCC | |
| | CGACUCUUAACACUACGGGCUUCGCUGAUCCCAACACCAC | |
| | UACGGGGUUGCCUAGCUCGACACAUGUGCCGACGAACCU | |
| | GACUGCCCCUGCAUCGACCGGGCCCACAGUUUCGACCGCC | |
| | GAUGUGACAUCACCAACGCCCGCAGGUACAACCUCAGGC | |
| | GCCAGCCCAGUGACCCCUUCCCCAAGCCCCUGGGAUAAUG | |
| | GAACGGAGUCCAAGGCUCCUGAUAUGACUUCCUCUACCA | |
| | GCCCCGUGACUACACCCACUCCCAACGCAACUAGCCCAAC | |
| | CCCAGCUGUGACGACGCCCACCCCGAACGCGACAUCUCCC | |
| | ACACCUGCUGUGACAACCCCAACCCCUAACGCCACUAGCC | |
| | CUACCCUAGGUAAGACCAGUCCGACUAGCGCCGUUACAA | |
| | CCCCUACCCCUAACGCAACCGGCCCGACCGUGGGCGAGAC | |
| | UUCCCCGCAAGCCAAUGCGACAAAUCACACAUUGGGCGG | |
| | GACCUCUCCUACACCAGUCGUUACAUCUCAGCCUAAGAAC | |
| | GCUACCUCCGCUGUCACUACCGGACAGCACAACAUCACCA | |
| | GCUCAAGCACGAGUUCCAUGAGCUUGCGGCCGAGCUCAA | |
| | AUCCCGAGACCCUAUCACCAUCCACAUCAGACAACAGUAC | |
| | UUCACACAUGCCACUCUUGACGAGCGCUCACCCCACCGGC | |
| | GGCGAGAACAUCACCCAGGUGACUCCGGCGUCUAUUUCC | |
| | ACCCACCACGUCAGCACGUCGUCUCCCGCACCGAGACCAG | |
| | GGACGACUUCUCAGGCCAGUGGGCCUGGCAACUCCUCUA | |
| | CAAGCACAAAGCCAGGCGAAGUUAACGUGACAAAGGGAA | |
| | CGCCUCCCCAGAACGCAACCAGUCCUCAGGCGCCCAGCGG | |
| | GCAGAAGACUGCGGUGCCAACUGUGACCAGCACCGGUGG | |
| | CAAGGCCAACUCAACAACUGGAGGCAAGCAUACGACGGG | |
| | GCACGGCGCCCGGACCUCCACUGAACCCACGACCGAUUAC | |
| | GGAGGUGACAGCACAACACCGCGGCCACGAUAUAAUGCC | |
| | ACCACUUAUCUGCCACCAUCCACAAGCUCCAAGCUGCGGC | |
| | CACGGUGGACCUUCACAAGCCCACCCGUGACGACUGCCCA | |
| | AGCGACGGUGCCAGUGCCACCUACAAGCCAGCCACGCUUC | |
| | UCCAACCUUAGUAUGCUCGUUCUCCAGUGGGCCAGCCUU | |
| | GCUGUUCUGACCCUCCUCCUGCUGCUCGUGAUGGCCGAU | |
| | UGCGCCUUUAGGAGAAACCUCAGCACUAGCCACACGUAC | |
| | ACCACGCCGCCCUACGAUGACGCCGAGACUUACGUC | |
| 3′UTR | UGAUAAUAGGCUGGAGCCUCGGUGGCCAUGCUUCUUGCC | 3 |
| | CCUUGGGCCUCCCCCCAGCCCCUCCUCCCCUUCCUGCACC | |
| | CGUACCCCCGUGGUCUUUGAAUAAAGUCUGAGUGGGCGG | |
| | C | |
| Corresponding | MEAALLVCQYTIQSLIHLTGEDPGFFNVEIPEFPFYPTCNVCTA | 49 |
| amino acid | DVNVTINFDVGGKKHQLDLDFGQLTPHTKAVYQPRGAFGGS | |
| sequence | ENATNLFLLELLGAGELALTMRSKKLPINVTTGEEQQVSLESV | |
| | DVYFQDVFGTMWCHHAEMQNPVYLIPETVPYIKWDNCNSTN | |
| | ITAVVRAQGLDVTLPLSLPTSAQDSNFSVKTEILGNEIDIECIME | |
| | DGEISQVLPGDNKFNITCSGYESHVPSGGILTSTSPVATPIPGTG | |
| | YAYSLRLTPRPVSRFLGNNSILYVFYSGNGPKASGGDYCIQSNI | |
| | VFSDEIPASQDMPTNTTDITYVGDNATYSVPMVTSEDANSPNV | |
| | TVTAFWAWPNNTETDFKCKWTLTSGTPSGCENISGAFASNRT | |
| | FDITVSGLGTAPKTLIITRTATNATTTTHKVIFSKAPESTTTSPT | |
| | LNTTGFADPNTTTGLPSSTHVPTNLTAPASTGPTVSTADVTSPT | |
| | PAGTTSGASPVTPSPSPWDNGTESKAPDMTSSTSPVTTPTPNA | |
| | TSPTPAVTTPTPNATSPTPAVTTPTPNATSPTLGKTSPTSAVTTP | |
| | TPNATGPTVGETSPQANATNHTLGGTSPTPVVTSQPKNATSAV | |
| | TTGQHNITSSSTSSMSLRPSSNPETLSPSTSDNSTSHMPLLTSAH | |
| | PTGGENITQVTPASISTHHVSTSSPAPRPGTTSQASGPGNSSTST | |
| | KPGEVNVTKGTPPQNATSPQAPSGQKTAVPTVTSTGGKANST | |
| | TGGKHTTGHGARTSTEPTTDYGGDSTTPRPRYNATTYLPPSTS | |
| | SKLRPRWTFTSPPVTTAQATVPVPPTSQPRFSNLSMLVLQWAS | |
| | LAVLTLLLLLVMADCAFRRNLSTSHTYTTPPYDDAETYV | |
| PolyA tail | 100 nt | |

EBV gp350 11417W V13 Stab

| SEQ ID NO: 165 consists of from 5′ end to 3′ end: | | 165 |
|---|---|---|
| 5′ UTR SEQ ID NO: 1, mRNA ORF SEQ ID NO: 50, and | | |
| 3′ UTR SEQ ID NO: 3 | | |
| Chemistry | 1-methylpseudouridine | |
| Cap | 7mG(5′)ppp(5′)NlmpNp | |
| 5′ UTR | GGGAAAUAAGAGAGAAAAGAAGAGUAAGAAGAAAUAUA | 1 |
| | AGAGCCACC | |
| ORF of mRNA | AUGGAGGCAGCACUGCUGGUCUGCCAGUAUACAAUCCAG | 50 |
| Construct | UCGCUCAUUCAUCUGACAGGCGAGGACCCCGGCUUCUUU | |
| (excluding | AACGUGGAAAUCCCAGAGUUCCCUUUCUAUCCAACCUGU | |
| the stop | AACGUUUGCACUGCUGACGUGAACGUGACAAUCAAUUUC | |
| codon) | GACGUGGGAGGAAAGAAGCAUCAGCUUGAUCUGGAUUUC | |
| | GGCCAACUGACGCCACACACCAAAGCGGUGUACCAACCAA | |
| | GGGGUGCAUUUGGAGGGAGCGAGAAUGCUACAAAUCUGU | |
| | UCUUACUGGAACUGCUUGGUGCAGGAGAGCUGGCACUAA | |
| | CCAUGCGAAGCAAGAAGCUCCCCAUCAACGUUACCACCGG | |
| | GGAAGAACAGCAAGUCAGCCUUGAAUCCGUGGAUGUGUA | |
| | CUUUCAGGAUGUUUUCGGCACCAUGUGGUGUCACCACGC | |
| | UGAGAUGCAGAAUCCCGUGUAUCUCAUACCCGAGACUGU | |
| | ACCCUACAUCAAGUGGGAUAAUUGCAAUUCAACUAAUAU | |
| | UACGGCUGUGGUGAGGGCCCAGGGCUUGGACGUGACUCU | |
| | GCCCUUAUCUCUACCUACUUCUGCCCAAGACUCCAAUUUC | |
| | UCUGUCAAGACCGAGAUGCUCGGGAAUGAGAUCGAUAUC | |
| | GAGUGCAUCAUGGAGGACGGUGAGAUAAGCCAGGUUCUG | |
| | CCCGGCGACAACAAGUUCAAUAUCACUUGUUCUGGCUAC | |
| | GAGUCCCAUGUGCCUAGUGGUGGCAUACUCACAAGUACU | |
| | UCUCCCGUAGCCACGCCCAUUCCCGGAACCGGAUACGCCU | |
| | ACAGUCUGCGUCUGACCCCACGGCCUGUGUCCAGAUUCCU | |
| | GGGUAACAAUAGUAUCUUAUACGUGUUUUAUAGCGGAAA | |
| | CGGCCCUAAAGCGUCCGGAGGGGACUAUUGUAUUCAGAG | |
| | UAAUAUCGUUUUCUCUGAUGAGAUUCCUGCCAGUCAGGA | |
| | CAUGCCGACAAACACAACUGAUAUUACCUACGUGGGCGA | |
| | CAAUGCCACGUAUUCAGUGCCCAUGGUCACGAGCGAGGA | |
| | CGCCAAUUCACCAAAUGUUACUGUAACAGCUUUCUGGGC | |
| | CUGGCCAAAUAACACUGAGACUGACUUCAAAUGUAAGUG | |
| | GACUUUGACCUCUGGAACUCCGUCGGGUUGCGAGAAUAU | |
| | CAGCGGGGCCUUUGCUUCCAACAGGACUUUCGACAUCAC | |
| | UGUCUCAGGGCUGGGGACAGCACCGAAGACAUUAAUCAU | |
| | AACACGGACCGCCACCAACGCCACGACUACAACCUGGAAG | |
| | GUGAUCUUUUCCAAGGCACCUGAGUCCACCACUACCUCCC | |
| | CGACUCUUAACACUACGGGCUUCGCUGAUCCCAACACCAC | |
| | UACGGGGUUGCCUAGCUCGACACAUGUGCCGACGAACCU | |
| | GACUGCCCCUGCAUCGACCGGGCCCACAGUUUCGACCGCC | |
| | GAUGUGACAUCACCAACGCCCGCAGGUACAACCUCAGGC | |
| | GCCAGCCCAGUGACCCCUUCCCCAAGCCCCUGGGAUAAUG | |
| | GAACGGAGUCCAAGGCUCCUGAUAUGACUUCCUCUACCA | |
| | GCCCCGUGACUACACCCACUCCCAACGCAACUAGCCCAAC | |
| | CCCAGCUGUGACGACGCCCACCCCGAACGCGACAUCUCCC | |
| | ACACCUGCUGUGACAACCCCAACCCCUAACGCCACUAGCC | |
| | CUACCCUAGGUAAGACCAGUCCGACUAGCGCCGUUACAA | |
| | CCCCUACCCCUAACGCAACCGGCCCGACCGUGGGCGAGAC | |
| | UUCCCCGCAAGCCAAUGCGACAAAUCACACAUUGGGCGG | |
| | GACCUCUCCUACACCAGUCGUUACAUCUCAGCCUAAGAAC | |
| | GCUACCUCCGCUGUCACUACCGGACAGCACAACAUCACCA | |
| | GCUCAAGCACGAGUUCCAUGAGCUUGCGGCCGAGCUCAA | |
| | AUCCCGAGACCCUAUCACCAUCCACAUCAGACAACAGUAC | |
| | UUCACACAUGCCACUCUUGACGAGCGCUCACCCCACCGGC | |
| | GGCGAGAACAUCACCCAGGUGACUCCGGCGUCUAUUUCC | |
| | ACCCACCACGUCAGCACGUCGUCUCCCGCACCGAGACCAG | |
| | GGACGACUUCUCAGGCCAGUGGGCCUGGCAACUCCUCUA | |
| | CAAGCACAAAGCCAGGCGAAGUUAACGUGACAAAGGGAA | |
| | CGCCUCCCCAGAACGCAACCAGUCCUCAGGCGCCCAGCGG | |
| | GCAGAAGACUGCGGUGCCAACUGUGACCAGCACCGGUGG | |
| | CAAGGCCAACUCAACAACUGGAGGCAAGCAUACGACGGG | |
| | GCACGGCGCCCGGACCUCCACUGAACCCACGACCGAUUAC | |
| | GGAGGUGACAGCACAACACCGCGGCCACGAUAUAAUGCC | |
| | ACCACUUAUCUGCCACCAUCCACAAGCUCCAAGCUGCGGC | |
| | CACGGUGGACCUUCACAAGCCCACCCGUGACGACUGCCCA | |
| | AGCGACGGUGCCAGUGCCACCUACAAGCCAGCCACGCUUC | |
| | UCCAACCUUAGUAUGCUCGUUCUCCAGUGGGCCAGCCUU | |
| | GCUGUUCUGACCCUCCUCCUGCUGCUCGUGAUGGCCGAU | |
| | UGCGCCUUUAGGAGAAACCUCAGCACUAGCCACACGUAC | |
| | ACCACGCCGCCCUACGAUGACGCCGAGACUUACGUC | |
| 3′ UTR | UGAUAAUAGGCUGGAGCCUCGGUGGCCAUGCUUCUUGCC | 3 |
| | CCUUGGGCCUCCCCCCAGCCCCUCCUCCCCUUCCUGCACC | |
| | CGUACCCCCGUGGUCUUUGAAUAAAGUCUGAGUGGGCGG | |
| | C | |
| Corresponding | MEAALLVCQYTIQSLIHLTGEDPGFFNVEIPEFPFYPTCNVCTA | 51 |
| amino acid | DVNVTINFDVGGKKHQLDLDFGQLTPHTKAVYQPRGAFGGS | |
| sequence | ENATNLFLLELLGAGELALTMRSKKLPINVTTGEEQQVSLESV | |
| | DVYFQDVFGTMWCHHAEMQNPVYLIPETVPYIKWDNCNSTN | |
| | ITAVVRAQGLDVTLPLSLPTSAQDSNFSVKTEMLGNEIDIECIM | |
| | EDGEISQVLPGDNKFNITCSGYESHVPSGGILTSTSPVATPIPGT | |
| | GYAYSLRLTPRPVSRFLGNNSILYVFYSGNGPKASGGDYCIQS | |
| | NIVFSDEIPASQDMPTNTTDITYVGDNATYSVPMVTSEDANSP | |
| | NVTVTAFWAWPNNTETDFKCKWTLTSGTPSGCENISGAFASN | |
| | RTFDITVSGLGTAPKTLIITRTATNATTTTWKVIFSKAPESTTTS | |
| | PTLNTTGFADPNTTTGLPSSTHVPTNLTAPASTGPTVSTADVTS | |
| | PTPAGTTSGASPVTPSPSPWDNGTESKAPDMTSSTSPVTTPTPN | |
| | ATSPTPAVTTPTPNATSPTPAVTTPTPNATSPTLGKTSPTSAVT | |
| | TPTPNATGPTVGETSPQANATNHTLGGTSPTPVVTSQPKNATS | |
| | AVTTGQHNITSSSTSSMSLRPSSNPETLSPSTSDNSTSHMPLLTS | |
| | AHPTGGENITQVTPASISTHHVSTSSPAPRPGTTSQASGPGNSS | |
| | TSTKPGEVNVTKGTPPQNATSPQAPSGQKTAVPTVTSTGGKA | |
| | NSTTGGKHTTGHGARTSTEPTTDYGGDSTTPRPRYNATTYLPP | |
| | STSSKLRPRWTFTSPPVTTAQATVPVPPTSQPRFSNLSMLVLQ | |
| | WASLAVLTLLLLLVMADCAFRRNLSTSHTYTTPPYDDAETYV | |
| PolyA tail | 100 nt | |

EBV gp350 V14 Stab4 mut

| SEQ ID NO: 166 consists of from 5′ end to 3′ end: | | 166 |
|---|---|---|
| 5′ UTR SEQ ID NO: 1, mRNA ORF SEQ ID NO: 52, and | | |
| 3′ UTR SEQ ID NO: 3 | | |
| Chemistry | 1-methylpseudouridine | |
| Cap | 7mG(5′)ppp(5′)NlmpNp | |
| 5′ UTR | GGGAAAUAAGAGAGAAAAGAAGAGUAAGAAGAAAUAUA | 1 |
| | AGAGCCACC | |
| ORF of mRNA | AUGGAGGCAGCACUGCUGGUCUGCCAGUAUACAAUCCAG | 52 |
| Construct | UCGCUCAUUCAUCUGACAGGCGAGGACCCCGGCUUCUUU | |
| (excluding | AACGUGGAAAUCCCAGAGUUCCCUUUCUAUCCAACCUGU | |
| the stop | AACGUUUGCACUUACGACGUGAACGUGACAUUCAAUUUC | |
| codon) | GACGUGGGAGGAAAGAAGCAUCAGCUUGAUCUGGAUUUC | |
| | GGCCAACUGACGCCACACACCAAAGCGGUGUACCAACCAA | |
| | GGGGUGCAUUUGGAGGGAGCGAGAAUGCUACAAAUCUGU | |
| | UCUUACUGGAACUGCUUGGUGCAGGAGAGCUGGCACUAA | |
| | CCAUGCGAAGCAAGAAGCUCCCCAUCAACGUUACCACCGG | |
| | GGAAGAACAGCAAGUCAGCCUUGAAUCCGUGGAUGUGUA | |
| | CUUUCAGGAUGUUUUCGGCACCAUGUGGUGUCACCACGC | |
| | UGAGAUGCAGAAUCCCGUGUAUCUCAUACCCGAGACUGU | |
| | ACCCUACAUCAAGUGGGAUAAUUGCAAUUCAACUAAUAU | |
| | UACGGCUGUGGUGAGGGCCCAGGGCUUGGACGUGACUCU | |
| | GCCCUUAUCUCUACCUACUUCUGCCCAAGACUCCAAUUUC | |
| | UCUGUCAAGACCGAGAUACUCGGGAAUGAGAUCGAUAUC | |
| | GAGUGCAUCAUGGAGGACGGUGAGAUAAGCCAGGUUCUG | |
| | CCCGGCGACAACAAGUUCAAUAUCACUUGUUCUGGCUAC | |
| | GAGUCCCAUGUGCCUAGUGGUGGCAUACUCACAAGUACU | |
| | UCUCCCGUAGCCACGCCCAUUCCCGGAACCGGAUACGCCU | |
| | ACAGUCUGCGUCUGACCCCACGGCCUGUGUCCAGAUUCCU | |
| | GGGUAACAAUAGUAUCUUAUACGUGUUUUAUAGCGGAAA | |
| | CGGCCCUAAAGCGUCCGGAGGGGACUAUUGUAUUCAGAG | |
| | UAAUAUCGUUUUCUCUGAUGAGAUUCCUGCCAGUCAGGA | |
| | CAUGCCGACAAACACAACUGAUAUUACCUACGUGGGCGA | |
| | CAAUGCCACGUAUUCAGUGCCCAUGGUCACGAGCGAGGA | |
| | CGCCAAUUCACCAAAUGUUACUGUAACAGCUUUCUGGGC | |
| | CUGGCCAAAUAACACUGAGACUGACUUCAAAUGUAAGUG | |
| | GACUUUGACCUCUGGAACUCCGUCGGGUUGCGAGAAUAU | |
| | CAGCGGGGCCUUUGCUUCCAACAGGACUUUCGACAUCAC | |
| | UGUCUCAGGGCUGGGGACAGCACCGAAGACAUUAAUCAU | |
| | AACACGGACCGCCACCAACGCCACGACUACAACCUGGAAG | |
| | GUGAUCUUUUCCAAGGCACCUGAGUCCACCACUACCUCCC | |
| | CGACUCUUAACACUACGGGCUUCGCUGAUCCCAACACCAC | |
| | UACGGGGUUGCCUAGCUCGACACAUGUGCCGACGAACCU | |
| | GACUGCCCCUGCAUCGACCGGGCCCACAGUUUCGACCGCC | |
| | GAUGUGACAUCACCAACGCCCGCAGGUACAACCUCAGGC | |
| | GCCAGCCCAGUGACCCCUUCCCCAAGCCCCUGGGAUAAUG | |
| | GAACGGAGUCCAAGGCUCCUGAUAUGACUUCCUCUACCA | |
| | GCCCCGUGACUACACCCACUCCCAACGCAACUAGCCCAAC | |
| | CCCAGCUGUGACGACGCCCACCCCGAACGCGACAUCUCCC | |
| | ACACCUGCUGUGACAACCCCAACCCCUAACGCCACUAGCC | |
| | CUACCCUAGGUAAGACCAGUCCGACUAGCGCCGUUACAA | |
| | CCCCUACCCCUAACGCAACCGGCCCGACCGUGGGCGAGAC | |
| | UUCCCCGCAAGCCAAUGCGACAAAUCACACAUUGGGCGG | |
| | GACCUCUCCUACACCAGUCGUUACAUCUCAGCCUAAGAAC | |
| | GCUACCUCCGCUGUCACUACCGGACAGCACAACAUCACCA | |
| | GCUCAAGCACGAGUUCCAUGAGCUUGCGGCCGAGCUCAA | |
| | AUCCCGAGACCCUAUCACCAUCCACAUCAGACAACAGUAC | |
| | UUCACACAUGCCACUCUUGACGAGCGCUCACCCCACCGGC | |
| | GGCGAGAACAUCACCCAGGUGACUCCGGCGUCUAUUUCC | |
| | ACCCACCACGUCAGCACGUCGUCUCCCGCACCGAGACCAG | |
| | GGACGACUUCUCAGGCCAGUGGGCCUGGCAACUCCUCUA | |
| | CAAGCACAAAGCCAGGCGAAGUUAACGUGACAAAGGGAA | |
| | CGCCUCCCCAGAACGCAACCAGUCCUCAGGCGCCCAGCGG | |
| | GCAGAAGACUGCGGUGCCAACUGUGACCAGCACCGGUGG | |
| | CAAGGCCAACUCAACAACUGGAGGCAAGCAUACGACGGG | |
| | GCACGGCGCCCGGACCUCCACUGAACCCACGACCGAUUAC | |
| | GGAGGUGACAGCACAACACCGCGGCCACGAUAUAAUGCC | |
| | ACCACUUAUCUGCCACCAUCCACAAGCUCCAAGCUGCGGC | |
| | CACGGUGGACCUUCACAAGCCCACCCGUGACGACUGCCCA | |
| | AGCGACGGUGCCAGUGCCACCUACAAGCCAGCCACGCUUC | |
| | UCCAACCUUAGUAUGCUCGUUCUCCAGUGGGCCAGCCUU | |
| | GCUGUUCUGACCCUCCUCCUGCUGCUCGUGAUGGCCGAU | |
| | UGCGCCUUUAGGAGAAACCUCAGCACUAGCCACACGUAC | |
| | ACCACGCCGCCCUACGAUGACGCCGAGACUUACGUC | |
| 3′ UTR | UGAUAAUAGGCUGGAGCCUCGGUGGCCAUGCUUCUUGCC | 3 |
| | CCUUGGGCCUCCCCCCAGCCCCUCCUCCCCUUCCUGCACC | |
| | CGUACCCCCGUGGUCUUUGAAUAAAGUCUGAGUGGGCGG | |
| | C | |
| Corresponding | MEAALLVCQYTIQSLIHLTGEDPGFFNVEIPEFPFYPTCNVCTY | 53 |
| amino acid | DVNVTFNFDVGGKKHQLDLDFGQLTPHTKAVYQPRGAFGGS | |
| sequence | ENATNLFLLELLGAGELALTMRSKKLPINVTTGEEQQVSLESV | |
| | DVYFQDVFGTMWCHHAEMQNPVYLIPETVPYIKWDNCNSTN | |
| | ITAVVRAQGLDVTLPLSLPTSAQDSNFSVKTEILGNEIDIECIME | |
| | DGEISQVLPGDNKFNITCSGYESHVPSGGILTSTSPVATPIPGTG | |
| | YAYSLRLTPRPVSRFLGNNSILYVFYSGNGPKASGGDYCIQSNI | |
| | VFSDEIPASQDMPTNTTDITYVGDNATYSVPMVTSEDANSPNV | |
| | TVTAFWAWPNNTETDFKCKWTLTSGTPSGCENISGAFASNRT | |
| | FDITVSGLGTAPKTLIITRTATNATTTTWKVIFSKAPESTTTSPT | |
| | LNTTGFADPNTTTGLPSSTHVPTNLTAPASTGPTVSTADVTSPT | |
| | PAGTTSGASPVTPSPSPWDNGTESKAPDMTSSTSPVTTPTPNA | |
| | TSPTPAVTTPTPNATSPTPAVTTPTPNATSPTLGKTSPTSAVTTP | |
| | TPNATGPTVGETSPQANATNHTLGGTSPTPVVTSQPKNATSAV | |
| | TTGQHNITSSSTSSMSLRPSSNPETLSPSTSDNSTSHMPLLTSAH | |
| | PTGGENITQVTPASISTHHVSTSSPAPRPGTTSQASGPGNSSTST | |
| | KPGEVNVTKGTPPQNATSPQAPSGQKTAVPTVTSTGGKANST | |
| | TGGKHTTGHGARTSTEPTTDYGGDSTTPRPRYNATTYLPPSTS | |
| | SKLRPRWTFTSPPVTTAQATVPVPPTSQPRFSNLSMLVLQWAS | |
| | LAVLTLLLLLVMADCAFRRNLSTSHTYTTPPYDDAETYV | |
| PolyA tail | 100 nt | |

EBV gp350 V15 Stab4_NGM6

| SEQ ID NO: 167 consists of from 5′ end to 3′ end: | | 167 |
|---|---|---|
| 5′ UTR SEQ ID NO: 1, mRNA ORF SEQ ID NO: 54, and | | |
| 3′ UTR SEQ ID NO: 3 | | |
| Chemistry | 1-methylpseudouridine | |
| Cap | 7mG(5′)ppp(5′)NlmpNp | |
| 5′ UTR | GGGAAAUAAGAGAGAAAAGAAGAGUAAGAAGAAAUAUA | 1 |
| | AGAGCCACC | |
| ORF of mRNA | AUGGAGGCAGCACUGCUGGUCUGCCAGUAUACAAUCCAG | 54 |
| Construct | UCGCUCAUUCAUCUGACAGGCGAGGACCCCGGCUUCUUU | |
| (excluding | AACGUGGAAAUCCCAGAGUUCCCUUUCUAUCCAACCUGU | |
| the stop | AACGUUUGCACUUACGACGUGAACGUGACAUUCAAUUUC | |
| codon) | GACGUGGGAGGAAAGAAGCAUCAGCUUGAUCUGGAUUUC | |
| | GGCCAACUGACGCCACACACCAAAGCGGUGUACCAACCAA | |
| | GGGGUGCAUUUGGAGGGAGCGAGAAUGCUGCGAAUCUGU | |
| | UCUUACUGGAACUGCUUGGUGCAGGAGAGCUGGCACUAA | |
| | CCAUGCGAAGCAAGAAGCUCCCCAUCAACGUUACCACCGG | |
| | GGAAGAACAGCAAGUCAGCCUUGAAUCCGUGGAUGUGUA | |
| | CUUUCAGGAUGUUUUCGGCACCAUGUGGUGUCACCACGC | |
| | UGAGAUGCAGAAUCCCGUGUAUCUCAUACCCGAGACUGU | |
| | ACCCUACAUCAAGUGGGAUAAUUGCAAUUCAGCGAAUAU | |
| | UACGGCUGUGGUGAGGGCCCAGGGCUUGGACGUGACUCU | |
| | GCCCUUAUCUCUACCUACUUCUGCCCAAGACUCCAAUUUC | |
| | GCGGUCAAGACCGAGAUACUCGGGAAUGAGAUCGAUAUC | |
| | GAGUGCAUCAUGGAGGACGGUGAGAUAAGCCAGGUUCUG | |
| | CCCGGCGACAACAAGUUCAAUAUCGCGUGUUCUGGCUAC | |
| | GAGUCCCAUGUGCCUAGUGGUGGCAUACUCACAAGUACU | |
| | UCUCCCGUAGCCACGCCCAUUCCCGGAACCGGAUACGCCU | |
| | ACAGUCUGCGUCUGACCCCACGGCCUGUGUCCAGAUUCCU | |
| | GGGUAACAAUAGUAUCUUAUACGUGUUUUAUAGCGGAAA | |
| | CGGCCCUAAAGCGUCCGGAGGGGACUAUUGUAUUCAGAG | |
| | UAAUAUCGUUUUCUCUGAUGAGAUUCCUGCCAGUCAGGA | |
| | CAUGCCGACAAACACAACUGAUAUUACCUACGUGGGCGA | |
| | CAAUGCCACGUAUUCAGUGCCCAUGGUCACGAGCGAGGA | |
| | CGCCAAUUCACCAAAUGUUGCGGUAACAGCUUUCUGGGC | |
| | CUGGCCAAAUAACACUGAGACUGACUUCAAAUGUAAGUG | |
| | GACUUUGACCUCUGGAACUCCGUCGGGUUGCGAGAAUAU | |
| | CAGCGGGGCCUUUGCUUCCAACAGGACUUUCGACAUCAC | |
| | UGUCUCAGGGCUGGGGACAGCACCGAAGACAUUAAUCAU | |
| | AACACGGACCGCCACCAACGCCGCGACUACAACCCAUAAG | |
| | GUGAUCUUUUCCAAGGCACCUGAGUCCACCACUACCUCCC | |
| | CGACUCUUAACACUACGGGCUUCGCUGAUCCCAACACCAC | |
| | UACGGGGUUGCCUAGCUCGACACAUGUGCCGACGAACCU | |
| | GACUGCCCCUGCAUCGACCGGGCCCACAGUUUCGACCUGG | |
| | GAUGUGACAUCACCAACGCCCGCAGGUACAACCUCAGGC | |
| | GCCAGCCCAGUGACCCCUUCCCCAAGCCCCUGGGAUAAUG | |
| | GAACGGAGUCCAAGGCUCCUGAUAUGACUUCCUCUACCA | |
| | GCCCCGUGACUACACCCACUCCCAACGCAACUAGCCCAAC | |
| | CCCAGCUGUGACGACGCCCACCCCGAACGCGACAUCUCCC | |
| | ACACCUGCUGUGACAACCCCAACCCCUAACGCCACUAGCC | |
| | CUACCCUAGGUAAGACCAGUCCGACUAGCGCCGUUACAA | |
| | CCCCUACCCCUAACGCAACCGGCCCGACCGUGGGCGAGAC | |
| | UUCCCCGCAAGCCAAUGCGACAAAUCACACAUUGGGCGG | |
| | GACCUCUCCUACACCAGUCGUUACAUCUCAGCCUAAGAAC | |
| | GCUACCUCCGCUGUCACUACCGGACAGCACAACAUCACCA | |
| | GCUCAAGCACGAGUUCCAUGAGCUUGCGGCCGAGCUCAA | |
| | AUCCCGAGACCCUAUCACCAUCCACAUCAGACAACAGUAC | |
| | UUCACACAUGCCACUCUUGACGAGCGCUCACCCCACCGGC | |
| | GGCGAGAACAUCACCCAGGUGACUCCGGCGUCUAUUUCC | |
| | ACCCACCACGUCAGCACGUCGUCUCCCGCACCGAGACCAG | |
| | GGACGACUUCUCAGGCCAGUGGGCCUGGCAACUCCUCUA | |
| | CAAGCACAAAGCCAGGCGAAGUUAACGUGACAAAGGGAA | |
| | CGCCUCCCCAGAACGCAACCAGUCCUCAGGCGCCCAGCGG | |
| | GCAGAAGACUGCGGUGCCAACUGUGACCAGCACCGGUGG | |
| | CAAGGCCAACUCAACAACUGGAGGCAAGCAUACGACGGG | |
| | GCACGGCGCCCGGACCUCCACUGAACCCACGACCGAUUAC | |
| | GGAGGUGACAGCACAACACCGCGGCCACGAUAUAAUGCC | |
| | ACCACUUAUCUGCCACCAUCCACAAGCUCCAAGCUGCGGC | |
| | CACGGUGGACCUUCACAAGCCCACCCGUGACGACUGCCCA | |
| | AGCGACGGUGCCAGUGCCACCUACAAGCCAGCCACGCUUC | |
| | UCCAACCUUAGUAUGCUCGUUCUCCAGUGGGCCAGCCUU | |
| | GCUGUUCUGACCCUCCUCCUGCUGCUCGUGAUGGCCGAU | |
| | UGCGCCUUUAGGAGAAACCUCAGCACUAGCCACACGUAC | |
| | ACCACGCCGCCCUACGAUGACGCCGAGACUUACGUC | |
| 3′UTR | UGAUAAUAGGCUGGAGCCUCGGUGGCCAUGCUUCUUGCC | 3 |
| | CCUUGGGCCUCCCCCCAGCCCCUCCUCCCCUUCCUGCACC | |
| | CGUACCCCCGUGGUCUUUGAAUAAAGUCUGAGUGGGCGG | |
| | C | |
| Corresponding | MEAALLVCQYTIQSLIHLTGEDPGFFNVEIPEFPFYPTCNVCTY | 55 |
| amino acid | DVNVTFNFDVGGKKHQLDLDFGQLTPHTKAVYQPRGAFGGS | |
| sequence | ENAANLFLLELLGAGELALTMRSKKLPINVTTGEEQQVSLESV | |
| | DVYFQDVFGTMWCHHAEMQNPVYLIPETVPYIKWDNCNSAN | |
| | ITAVVRAQGLDVTLPLSLPTSAQDSNFAVKTEILGNEIDIECIM | |
| | EDGEISQVLPGDNKFNIACSGYESHVPSGGILTSTSPVATPIPGT | |
| | GYAYSLRLTPRPVSRFLGNNSILYVFYSGNGPKASGGDYCIQS | |
| | NIVFSDEIPASQDMPTNTTDITYVGDNATYSVPMVTSEDANSP | |
| | NVAVTAFWAWPNNTETDFKCKWTLTSGTPSGCENISGAFASN | |
| | RTFDITVSGLGTAPKTLIITRTATNAATTTHKVIFSKAPESTTTS | |
| | PTLNTTGFADPNTTTGLPSSTHVPTNLTAPASTGPTVSTWDVT | |
| | SPTPAGTTSGASPVTPSPSPWDNGTESKAPDMTSSTSPVTTPTP | |
| | NATSPTPAVTTPTPNATSPTPAVTTPTPNATSPTLGKTSPTSAV | |
| | TTPTPNATGPTVGETSPQANATNHTLGGTSPTPVVTSQPKNAT | |
| | SAVTTGQHNITSSSTSSMSLRPSSNPETLSPSTSDNSTSHMPLLT | |
| | SAHPTGGENITQVTPASISTHHVSTSSPAPRPGTTSQASGPGNS | |
| | STSTKPGEVNVTKGTPPQNATSPQAPSGQKTAVPTVTSTGGK | |
| | ANSTTGGKHTTGHGARTSTEPTTDYGGDSTTPRPRYNATTYL | |
| | PPSTSSKLRPRWTFTSPPVTTAQATVPVPPTSQPRFSNLSMLVL | |
| | QWASLAVLTLLLLLVMADCAFRRNLSTSHTYTTPPYDDAETY | |
| | V | |
| PolyA tail | 100 nt | |

V1_NGM 36 mut_EBV_gp350_001

| SEQ ID NO: 168 consists of from 5′ end to 3′ end: | | 168 |
|---|---|---|
| 5′ UTR SEQ ID NO: 1, mRNA ORF SEQ ID NO: 56, and | | |
| 3′ UTR SEQ ID NO: 3 | | |
| Chemistry | 1-methylpseudouridine | |
| Cap | 7mG(5′)ppp(5′)NlmpNp | |
| 5′ UTR | GGGAAAUAAGAGAGAAAAGAAGAGUAAGAAGAAAUAUA | 1 |
| | AGAGCCACC | |
| ORF of mRNA | AUGGAGGCAGCACUGCUGGUCUGCCAGUAUACAAUCCAG | 56 |
| Construct | UCGCUCAUUCAUCUGACAGGCGAGGACCCCGGCUUCUUU | |
| (excluding | AACGUGGAAAUCCCAGAGUUCCCUUUCUAUCCAACCUGU | |
| the stop | AACGUUUGCACUGCUGACGUGAACGUGGCGAUCAAUUUC | |
| codon) | GACGUGGGAGGAAAGAAGCAUCAGCUUGAUCUGGAUUUC | |
| | GGCCAACUGACGCCACACACCAAAGCGGUGUACCAACCAA | |
| | GGGGUGCAUUUGGAGGGAGCGAGAAUGCUGCGAAUCUGU | |
| | UCUUACUGGAACUGCUUGGUGCAGGAGAGCUGGCACUAA | |
| | CCAUGCGAAGCAAGAAGCUCCCCAUCAACGUUGCGACCG | |
| | GGGAAGAACAGCAAGUCAGCCUUGAAUCCGUGGAUGUGU | |
| | ACUUUCAGGAUGUUUUCGGCACCAUGUGGUGUCACCACG | |
| | CUGAGAUGCAGAAUCCCGUGUAUCUCAUACCCGAGACUG | |
| | UACCCUACAUCAAGUGGGAUAAUUGCAAUUCAGCGAAUA | |
| | UUGCGGCUGUGGUGAGGGCCCAGGGCUUGGACGUGACUC | |
| | UGCCCUUAUCUCUACCUACUUCUGCCCAAGACUCCAAUUU | |
| | CGCGGUCAAGACCGAGAUGCUCGGGAAUGAGAUCGAUAU | |
| | CGAGUGCAUCAUGGAGGACGGUGAGAUAAGCCAGGUUCU | |
| | GCCCGGCGACAACAAGUUCAAUAUCGCGUGUUCUGGCUA | |
| | CGAGUCCCAUGUGCCUAGUGGUGGCAUACUCACAAGUAC | |
| | UUCUCCCGUAGCCACGCCCAUUCCCGGAACCGGAUACGCC | |
| | UACAGUCUGCGUCUGACCCCACGGCCUGUGUCCAGAUUCC | |
| | UGGGUAACAAUGCGAUCUUAUACGUGUUUUAUAGCGGAA | |
| | ACGGCCCUAAAGCGUCCGGAGGGGACUAUUGUAUUCAGA | |
| | GUAAUAUCGUUUUCUCUGAUGAGAUUCCUGCCAGUCAGG | |
| | ACAUGCCGACAAACACAGCGGAUAUUACCUACGUGGGCG | |
| | ACAAUGCCGCGUAUUCAGUGCCCAUGGUCACGAGCGAGG | |
| | ACGCCAAUUCACCAAAUGUUGCGGUAACAGCUUUCUGGG | |
| | CCUGGCCAAAUAACGCGGAGACUGACUUCAAAUGUAAGU | |
| | GGACUUUGACCUCUGGAACUCCGUCGGGUUGCGAGAAUA | |
| | UCGCGGGGGCCUUUGCUUCCAACAGGGCGUUCGACAUCA | |
| | CUGUCUCAGGGCUGGGGACAGCACCGAAGACAUUAAUCA | |
| | UAACACGGACCGCCACCAACGCCGCGACUACAACCCAUAA | |
| | GGUGAUCUUUUCCAAGGCACCUGAGUCCACCACUACCUCC | |
| | CCGACUCUUAACACUGCGGGCUUCGCUGAUCCCAACACCG | |
| | CGACGGGGUUGCCUAGCUCGACACAUGUGCCGACGAACC | |
| | UGGCGGCCCCUGCAUCGACCGGGCCCACAGUUUCGACCGC | |
| | CGAUGUGACAUCACCAACGCCCGCAGGUACAACCUCAGGC | |
| | GCCAGCCCAGUGACCCCUUCCCCAAGCCCCUGGGAUAAUG | |
| | GAGCGGAGUCCAAGGCUCCUGAUAUGACUUCCUCUACCA | |
| | GCCCCGUGACUACACCCACUCCCAACGCAGCGAGCCCAAC | |
| | CCCAGCUGUGACGACGCCCACCCCGAACGCGGCGUCUCCC | |
| | ACACCUGCUGUGACAACCCCAACCCCUAACGCCGCGAGCC | |
| | CUACCCUAGGUAAGACCAGUCCGACUAGCGCCGUUACAA | |
| | CCCCUACCCCUAACGCAGCGGGCCCGACCGUGGGCGAGAC | |
| | UUCCCCGCAAGCCAAUGCGGCGAAUCACGCGUUGGGCGG | |
| | GACCUCUCCUACACCAGUCGUUACAUCUCAGCCUAAGAAC | |
| | GCUGCGUCCGCUGUCACUACCGGACAGCACAACAUCGCGA | |
| | GCUCAAGCACGAGUUCCAUGAGCUUGCGGCCGAGCUCAA | |
| | AUCCCGAGACCCUAUCACCAUCCACAUCAGACAACAGUGC | |
| | GUCACACAUGCCACUCUUGACGAGCGCUCACCCCACCGGC | |
| | GGCGAGAACAUCGCGCAGGUGACUCCGGCGUCUAUUUCC | |
| | ACCCACCACGUCAGCACGUCGUCUCCCGCACCGAGACCAG | |
| | GGACGACUUCUCAGGCCAGUGGGCCUGGCAACUCCGCGA | |
| | CAAGCACAAAGCCAGGCGAAGUUAACGUGGCGAAGGGAA | |
| | CGCCUCCCCAGAACGCAGCGAGUCCUCAGGCGCCCAGCGG | |
| | GCAGAAGACUGCGGUGCCAACUGUGACCAGCACCGGUGG | |
| | CAAGGCCAACUCAGCGACUGGAGGCAAGCAUACGACGGG | |
| | GCACGGCGCCCGGACCUCCACUGAACCCACGACCGAUUAC | |
| | GGAGGUGACAGCACAACACCGCGGCCACGAUAUAAUGCC | |
| | GCGACUUAUCUGCCACCAUCCACAAGCUCCAAGCUGCGGC | |
| | CACGGUGGACCUUCACAAGCCCACCCGUGACGACUGCCCA | |
| | AGCGACGGUGCCAGUGCCACCUACAAGCCAGCCACGCUUC | |
| | UCCAACCUUGCGAUGCUCGUUCUCCAGUGGGCCAGCCUU | |
| | GCUGUUCUGACCCUCCUCCUGCUGCUCGUGAUGGCCGAU | |
| | UGCGCCUUUAGGAGAAACCUCGCGACUAGCCACACGUAC | |
| | ACCACGCCGCCCUACGAUGACGCCGAGACUUACGUC | |
| 3′ UTR | UGAUAAUAGGCUGGAGCCUCGGUGGCCAUGCUUCUUGCC | 3 |
| | CCUUGGGCCUCCCCCCAGCCCCUCCUCCCCUUCCUGCACC | |
| | CGUACCCCCGUGGUCUUUGAAUAAAGUCUGAGUGGGCGG | |
| | C | |
| Corresponding | MEAALLVCQYTIQSLIHLTGEDPGFFNVEIPEFPFYPTCNVCTA | 57 |
| amino acid | DVNVAINFDVGGKKHQLDLDFGQLTPHTKAVYQPRGAFGGS | |
| sequence | ENAANLFLLELLGAGELALTMRSKKLPINVATGEEQQVSLESV | |
| | DVYFQDVFGTMWCHHAEMQNPVYLIPETVPYIKWDNCNSAN | |
| | IAAVVRAQGLDVTLPLSLPTSAQDSNFAVKTEMLGNEIDIECI | |
| | MEDGEISQVLPGDNKFNIACSGYESHVPSGGILTSTSPVATPIP | |
| | GTGYAYSLRLTPRPVSRFLGNNAILYVFYSGNGPKASGGDYCI | |
| | QSNIVFSDEIPASQDMPTNTADITYVGDNAAYSVPMVTSEDAN | |
| | SPNVAVTAFWAWPNNAETDFKCKWTLTSGTPSGCENIAGAF | |
| | ASNRAFDITVSGLGTAPKTLIITRTATNAATTTHKVIFSKAPEST | |
| | TTSPTLNTAGFADPNTATGLPSSTHVPTNLAAPASTGPTVSTA | |
| | DVTSPTPAGTTSGASPVTPSPSPWDNGAESKAPDMTSSTSPVT | |
| | TPTPNAASPTPAVTTPTPNAASPTPAVTTPTPNAASPTLGKTSP | |
| | TSAVTTPTPNAAGPTVGETSPQANAANHALGGTSPTPVVTSQP | |
| | KNAASAVTTGQHNIASSSTSSMSLRPSSNPETLSPSTSDNSASH | |
| | MPLLTSAHPTGGENIAQVTPASISTHHVSTSSPAPRPGTTSQAS | |
| | GPGNSATSTKPGEVNVAKGTPPQNAASPQAPSGQKTAVPTVT | |
| | STGGKANSATGGKHTTGHGARTSTEPTTDYGGDSTTPRPRYN | |
| | AATYLPPSTSSKLRPRWTFTSPPVTTAQATVPVPPTSQPRFSNL | |
| | AMLVLQWASLAVLTLLLLLVMADCAFRRNLATSHTYTTPPY | |
| | DDAETYV | |
| PolyA tail | 100 nt | |

V2_NGM 18 mut_EBV_gp350_001

| SEQ ID NO: 169 consists of from 5′ end to 3′ end: | | 169 |
|---|---|---|
| 5′ UTR SEQ ID NO: 1, mRNA ORF SEQ ID NO: 58, and | | |
| 3′ UTR SEQ ID NO: 3 | | |
| Chemistry | 1-methylpseudouridine | |
| Cap | 7mG(5′)ppp(5′)NlmpNp | |
| 5′ UTR | GGGAAAUAAGAGAGAAAAGAAGAGUAAGAAGAAAUAUA | 1 |
| | AGAGCCACC | |
| ORF of mRNA | AUGGAGGCAGCACUGCUGGUCUGCCAGUAUACAAUCCAG | 58 |
| Construct | UCGCUCAUUCAUCUGACAGGCGAGGACCCCGGCUUCUUU | |
| (excluding | AACGUGGAAAUCCCAGAGUUCCCUUUCUAUCCAACCUGU | |
| the stop | AACGUUUGCACUGCUGACGUGAACGUGGCGAUCAAUUUC | |
| codon) | GACGUGGGAGGAAAGAAGCAUCAGCUUGAUCUGGAUUUC | |
| | GGCCAACUGACGCCACACACCAAAGCGGUGUACCAACCAA | |
| | GGGGUGCAUUUGGAGGGAGCGAGAAUGCUGCGAAUCUGU | |
| | UCUUACUGGAACUGCUUGGUGCAGGAGAGCUGGCACUAA | |
| | CCAUGCGAAGCAAGAAGCUCCCCAUCAACGUUGCGACCG | |
| | GGGAAGAACAGCAAGUCAGCCUUGAAUCCGUGGAUGUGU | |
| | ACUUUCAGGAUGUUUUCGGCACCAUGUGGUGUCACCACG | |
| | CUGAGAUGCAGAAUCCCGUGUAUCUCAUACCCGAGACUG | |
| | UACCCUACAUCAAGUGGGAUAAUUGCAAUUCAGCGAAUA | |
| | UUGCGGCUGUGGUGAGGGCCCAGGGCUUGGACGUGACUC | |
| | UGCCCUUAUCUCUACCUACUUCUGCCCAAGACUCCAAUUU | |
| | CGCGGUCAAGACCGAGAUGCUCGGGAAUGAGAUCGAUAU | |
| | CGAGUGCAUCAUGGAGGACGGUGAGAUAAGCCAGGUUCU | |
| | GCCCGGCGACAACAAGUUCAAUAUCGCGUGUUCUGGCUA | |
| | CGAGUCCCAUGUGCCUAGUGGUGGCAUACUCACAAGUAC | |
| | UUCUCCCGUAGCCACGCCCAUUCCCGGAACCGGAUACGCC | |
| | UACAGUCUGCGUCUGACCCCACGGCCUGUGUCCAGAUUCC | |
| | UGGGUAACAAUGCGAUCUUAUACGUGUUUUAUAGCGGAA | |
| | ACGGCCCUAAAGCGUCCGGAGGGGACUAUUGUAUUCAGA | |
| | GUAAUAUCGUUUUCUCUGAUGAGAUUCCUGCCAGUCAGG | |
| | ACAUGCCGACAAACACAGCGGAUAUUACCUACGUGGGCG | |
| | ACAAUGCCGCGUAUUCAGUGCCCAUGGUCACGAGCGAGG | |
| | ACGCCAAUUCACCAAAUGUUGCGGUAACAGCUUUCUGGG | |
| | CCUGGCCAAAUAACGCGGAGACUGACUUCAAAUGUAAGU | |
| | GGACUUUGACCUCUGGAACUCCGUCGGGUUGCGAGAAUA | |
| | UCGCGGGGGCCUUUGCUUCCAACAGGGCGUUCGACAUCA | |
| | CUGUCUCAGGGCUGGGGACAGCACCGAAGACAUUAAUCA | |
| | UAACACGGACCGCCACCAACGCCGCGACUACAACCCAUAA | |
| | GGUGAUCUUUUCCAAGGCACCUGAGUCCACCACUACCUCC | |
| | CCGACUCUUAACACUGCGGGCUUCGCUGAUCCCAACACCG | |
| | CGACGGGGUUGCCUAGCUCGACACAUGUGCCGACGAACC | |
| | UGGCGGCCCCUGCAUCGACCGGGCCCACAGUUUCGACCGC | |
| | CGAUGUGACAUCACCAACGCCCGCAGGUACAACCUCAGGC | |
| | GCCAGCCCAGUGACCCCUUCCCCAAGCCCCUGGGAUAAUG | |
| | GAACGGAGUCCAAGGCUCCUGAUAUGACUUCCUCUACCA | |
| | GCCCCGUGACUACACCCACUCCCAACGCAACUAGCCCAAC | |
| | CCCAGCUGUGACGACGCCCACCCCGAACGCGACAUCUCCC | |
| | ACACCUGCUGUGACAACCCCAACCCCUAACGCCACUAGCC | |
| | CUACCCUAGGUAAGACCAGUCCGACUAGCGCCGUUACAA | |
| | CCCCUACCCCUAACGCAACCGGCCCGACCGUGGGCGAGAC | |
| | UUCCCCGCAAGCCAAUGCGACAAAUCACACAUUGGGCGG | |
| | GACCUCUCCUACACCAGUCGUUACAUCUCAGCCUAAGAAC | |
| | GCUACCUCCGCUGUCACUACCGGACAGCACAACAUCACCA | |
| | GCUCAAGCACGAGUUCCAUGAGCUUGCGGCCGAGCUCAA | |
| | AUCCCGAGACCCUAUCACCAUCCACAUCAGACAACAGUAC | |
| | UUCACACAUGCCACUCUUGACGAGCGCUCACCCCACCGGC | |
| | GGCGAGAACAUCACCCAGGUGACUCCGGCGUCUAUUUCC | |
| | ACCCACCACGUCAGCACGUCGUCUCCCGCACCGAGACCAG | |
| | GGACGACUUCUCAGGCCAGUGGGCCUGGCAACUCCUCUA | |
| | CAAGCACAAAGCCAGGCGAAGUUAACGUGACAAAGGGAA | |
| | CGCCUCCCCAGAACGCAACCAGUCCUCAGGCGCCCAGCGG | |
| | GCAGAAGACUGCGGUGCCAACUGUGACCAGCACCGGUGG | |
| | CAAGGCCAACUCAACAACUGGAGGCAAGCAUACGACGGG | |
| | GCACGGCGCCCGGACCUCCACUGAACCCACGACCGAUUAC | |
| | GGAGGUGACAGCACAACACCGCGGCCACGAUAUAAUGCC | |
| | ACCACUUAUCUGCCACCAUCCACAAGCUCCAAGCUGCGGC | |
| | CACGGUGGACCUUCACAAGCCCACCCGUGACGACUGCCCA | |
| | AGCGACGGUGCCAGUGCCACCUACAAGCCAGCCACGCUUC | |
| | UCCAACCUUAGUAUGCUCGUUCUCCAGUGGGCCAGCCUU | |
| | GCUGUUCUGACCCUCCUCCUGCUGCUCGUGAUGGCCGAU | |
| | UGCGCCUUUAGGAGAAACCUCAGCACUAGCCACACGUAC | |
| | ACCACGCCGCCCUACGAUGACGCCGAGACUUACGUC | |
| 3′UTR | UGAUAAUAGGCUGGAGCCUCGGUGGCCAUGCUUCUUGCC | 3 |
| | CCUUGGGCCUCCCCCCAGCCCCUCCUCCCCUUCCUGCACC | |
| | CGUACCCCCGUGGUCUUUGAAUAAAGUCUGAGUGGGCGG | |
| | C | |
| Corresponding | MEAALLVCQYTIQSLIHLTGEDPGFFNVEIPEFPFYPTCNVCTA | 59 |
| amino acid | DVNVAINFDVGGKKHQLDLDFGQLTPHTKAVYQPRGAFGGS | |
| sequence | ENAANLFLLELLGAGELALTMRSKKLPINVATGEEQQVSLESV | |
| | DVYFQDVFGTMWCHHAEMQNPVYLIPETVPYIKWDNCNSAN | |
| | IAAVVRAQGLDVTLPLSLPTSAQDSNFAVKTEMLGNEIDIECI | |
| | MEDGEISQVLPGDNKFNIACSGYESHVPSGGILTSTSPVATPIP | |
| | GTGYAYSLRLTPRPVSRFLGNNAILYVFYSGNGPKASGGDYCI | |
| | QSNIVFSDEIPASQDMPTNTADITYVGDNAAYSVPMVTSEDAN | |
| | SPNVAVTAFWAWPNNAETDFKCKWTLTSGTPSGCENIAGAF | |
| | ASNRAFDITVSGLGTAPKTLIITRTATNAATTTHKVIFSKAPEST | |
| | TTSPTLNTAGFADPNTATGLPSSTHVPTNLAAPASTGPTVSTA | |
| | DVTSPTPAGTTSGASPVTPSPSPWDNGTESKAPDMTSSTSPVT | |
| | TPTPNATSPTPAVTTPTPNATSPTPAVTTPTPNATSPTLGKTSPT | |
| | SAVTTPTPNATGPTVGETSPQANATNHTLGGTSPTPVVTSQPK | |
| | NATSAVTTGQHNITSSSTSSMSLRPSSNPETLSPSTSDNSTSHM | |
| | PLLTSAHPTGGENITQVTPASISTHHVSTSSPAPRPGTTSQASGP | |
| | GNSSTSTKPGEVNVTKGTPPQNATSPQAPSGQKTAVPTVTSTG | |
| | GKANSTTGGKHTTGHGARTSTEPTTDYGGDSTTPRPRYNATT | |
| | YLPPSTSSKLRPRWTFTSPPVTTAQATVPVPPTSQPRFSNLSML | |
| | VLQWASLAVLTLLLLLVMADCAFRRNLSTSHTYTTPPYDDAE | |
| | TYV | |
| PolyA tail | 100 nt | |

V4_NGM N87_EBV_gp350_001

| SEQ ID NO: 170 consists of from 5′ end to 3′ end: | | 170 |
|---|---|---|
| 5′ UTR SEQ ID NO: 1, mRNA ORF SEQ ID NO: 60, and | | |
| 3′ UTR SEQ ID NO: 3 | | |
| Chemistry | 1-methylpseudouridine | |
| Cap | 7mG(5′)ppp(5′)NlmpNp | |
| 5′ UTR | GGGAAAUAAGAGAGAAAAGAAGAGUAAGAAGAAAUAUA | 1 |
| | AGAGCCACC | |
| ORF of mRNA | AUGGAGGCAGCACUGCUGGUCUGCCAGUAUACAAUCCAG | 60 |
| Construct | UCGCUCAUUCAUCUGACAGGCGAGGACCCCGGCUUCUUU | |
| (excluding | AACGUGGAAAUCCCAGAGUUCCCUUUCUAUCCAACCUGU | |
| the stop | AACGUUUGCACUGCUGACGUGAACGUGACAAUCAAUUUC | |
| codon) | GACGUGGGAGGAAAGAAGCAUCAGCUUGAUCUGGAUUUC | |
| | GGCCAACUGACGCCACACACCAAAGCGGUGUACCAACCAA | |
| | GGGGUGCAUUUGGAGGGAGCGAGAAUGCUGCGAAUCUGU | |
| | UCUUACUGGAACUGCUUGGUGCAGGAGAGCUGGCACUAA | |
| | CCAUGCGAAGCAAGAAGCUCCCCAUCAACGUUACCACCGG | |
| | GGAAGAACAGCAAGUCAGCCUUGAAUCCGUGGAUGUGUA | |
| | CUUUCAGGAUGUUUUCGGCACCAUGUGGUGUCACCACGC | |
| | UGAGAUGCAGAAUCCCGUGUAUCUCAUACCCGAGACUGU | |
| | ACCCUACAUCAAGUGGGAUAAUUGCAAUUCAACUAAUAU | |
| | UACGGCUGUGGUGAGGGCCCAGGGCUUGGACGUGACUCU | |
| | GCCCUUAUCUCUACCUACUUCUGCCCAAGACUCCAAUUUC | |
| | UCUGUCAAGACCGAGAUGCUCGGGAAUGAGAUCGAUAUC | |
| | GAGUGCAUCAUGGAGGACGGUGAGAUAAGCCAGGUUCUG | |
| | CCCGGCGACAACAAGUUCAAUAUCACUUGUUCUGGCUAC | |
| | GAGUCCCAUGUGCCUAGUGGUGGCAUACUCACAAGUACU | |
| | UCUCCCGUAGCCACGCCCAUUCCCGGAACCGGAUACGCCU | |
| | ACAGUCUGCGUCUGACCCCACGGCCUGUGUCCAGAUUCCU | |
| | GGGUAACAAUAGUAUCUUAUACGUGUUUUAUAGCGGAAA | |
| | CGGCCCUAAAGCGUCCGGAGGGGACUAUUGUAUUCAGAG | |
| | UAAUAUCGUUUUCUCUGAUGAGAUUCCUGCCAGUCAGGA | |
| | CAUGCCGACAAACACAACUGAUAUUACCUACGUGGGCGA | |
| | CAAUGCCACGUAUUCAGUGCCCAUGGUCACGAGCGAGGA | |
| | CGCCAAUUCACCAAAUGUUACUGUAACAGCUUUCUGGGC | |
| | CUGGCCAAAUAACACUGAGACUGACUUCAAAUGUAAGUG | |
| | GACUUUGACCUCUGGAACUCCGUCGGGUUGCGAGAAUAU | |
| | CAGCGGGGCCUUUGCUUCCAACAGGACUUUCGACAUCAC | |
| | UGUCUCAGGGCUGGGGACAGCACCGAAGACAUUAAUCAU | |
| | AACACGGACCGCCACCAACGCCACGACUACAACCCAUAAG | |
| | GUGAUCUUUUCCAAGGCACCUGAGUCCACCACUACCUCCC | |
| | CGACUCUUAACACUACGGGCUUCGCUGAUCCCAACACCAC | |
| | UACGGGGUUGCCUAGCUCGACACAUGUGCCGACGAACCU | |
| | GACUGCCCCUGCAUCGACCGGGCCCACAGUUUCGACCGCC | |
| | GAUGUGACAUCACCAACGCCCGCAGGUACAACCUCAGGC | |
| | GCCAGCCCAGUGACCCCUUCCCCAAGCCCCUGGGAUAAUG | |
| | GAACGGAGUCCAAGGCUCCUGAUAUGACUUCCUCUACCA | |
| | GCCCCGUGACUACACCCACUCCCAACGCAACUAGCCCAAC | |
| | CCCAGCUGUGACGACGCCCACCCCGAACGCGACAUCUCCC | |
| | ACACCUGCUGUGACAACCCCAACCCCUAACGCCACUAGCC | |
| | CUACCCUAGGUAAGACCAGUCCGACUAGCGCCGUUACAA | |
| | CCCCUACCCCUAACGCAACCGGCCCGACCGUGGGCGAGAC | |
| | UUCCCCGCAAGCCAAUGCGACAAAUCACACAUUGGGCGG | |
| | GACCUCUCCUACACCAGUCGUUACAUCUCAGCCUAAGAAC | |
| | GCUACCUCCGCUGUCACUACCGGACAGCACAACAUCACCA | |
| | GCUCAAGCACGAGUUCCAUGAGCUUGCGGCCGAGCUCAA | |
| | AUCCCGAGACCCUAUCACCAUCCACAUCAGACAACAGUAC | |
| | UUCACACAUGCCACUCUUGACGAGCGCUCACCCCACCGGC | |
| | GGCGAGAACAUCACCCAGGUGACUCCGGCGUCUAUUUCC | |
| | ACCCACCACGUCAGCACGUCGUCUCCCGCACCGAGACCAG | |
| | GGACGACUUCUCAGGCCAGUGGGCCUGGCAACUCCUCUA | |
| | CAAGCACAAAGCCAGGCGAAGUUAACGUGACAAAGGGAA | |
| | CGCCUCCCCAGAACGCAACCAGUCCUCAGGCGCCCAGCGG | |
| | GCAGAAGACUGCGGUGCCAACUGUGACCAGCACCGGUGG | |
| | CAAGGCCAACUCAACAACUGGAGGCAAGCAUACGACGGG | |
| | GCACGGCGCCCGGACCUCCACUGAACCCACGACCGAUUAC | |
| | GGAGGUGACAGCACAACACCGCGGCCACGAUAUAAUGCC | |
| | ACCACUUAUCUGCCACCAUCCACAAGCUCCAAGCUGCGGC | |
| | CACGGUGGACCUUCACAAGCCCACCCGUGACGACUGCCCA | |
| | AGCGACGGUGCCAGUGCCACCUACAAGCCAGCCACGCUUC | |
| | UCCAACCUUAGUAUGCUCGUUCUCCAGUGGGCCAGCCUU | |
| | GCUGUUCUGACCCUCCUCCUGCUGCUCGUGAUGGCCGAU | |
| | UGCGCCUUUAGGAGAAACCUCAGCACUAGCCACACGUAC | |
| | ACCACGCCGCCCUACGAUGACGCCGAGACUUACGUC | |
| 3′ UTR | UGAUAAUAGGCUGGAGCCUCGGUGGCCAUGCUUCUUGCC | 3 |
| | CCUUGGGCCUCCCCCCAGCCCCUCCUCCCCUUCCUGCACC | |
| | CGUACCCCCGUGGUCUUUGAAUAAAGUCUGAGUGGGCGG | |
| | C | |
| Corresponding | MEAALLVCQYTIQSLIHLTGEDPGFFNVEIPEFPFYPTCNVCTA | 61 |
| amino acid | DVNVTINFDVGGKKHQLDLDFGQLTPHTKAVYQPRGAFGGS | |
| sequence | ENAANLFLLELLGAGELALTMRSKKLPINVTTGEEQQVSLESV | |
| | DVYFQDVFGTMWCHHAEMQNPVYLIPETVPYIKWDNCNSTN | |
| | ITAVVRAQGLDVTLPLSLPTSAQDSNFSVKTEMLGNEIDIECIM | |
| | EDGEISQVLPGDNKFNITCSGYESHVPSGGILTSTSPVATPIPGT | |
| | GYAYSLRLTPRPVSRFLGNNSILYVFYSGNGPKASGGDYCIQS | |
| | NIVFSDEIPASQDMPTNTTDITYVGDNATYSVPMVTSEDANSP | |
| | NVTVTAFWAWPNNTETDFKCKWTLTSGTPSGCENISGAFASN | |
| | RTFDITVSGLGTAPKTLIITRTATNATTTTHKVIFSKAPESTTTS | |
| | PTLNTTGFADPNTTTGLPSSTHVPTNLTAPASTGPTVSTADVTS | |
| | PTPAGTTSGASPVTPSPSPWDNGTESKAPDMTSSTSPVTTPTPN | |
| | ATSPTPAVTTPTPNATSPTPAVTTPTPNATSPTLGKTSPTSAVT | |
| | TPTPNATGPTVGETSPQANATNHTLGGTSPTPVVTSQPKNATS | |
| | AVTTGQHNITSSSTSSMSLRPSSNPETLSPSTSDNSTSHMPLLTS | |
| | AHPTGGENITQVTPASISTHHVSTSSPAPRPGTTSQASGPGNSS | |
| | TSTKPGEVNVTKGTPPQNATSPQAPSGQKTAVPTVTSTGGKA | |
| | NSTTGGKHTTGHGARTSTEPTTDYGGDSTTPRPRYNATTYLPP | |
| | STSSKLRPRWTFTSPPVTTAQATVPVPPTSQPRFSNLSMLVLQ | |
| | WASLAVLTLLLLLVMADCAFRRNLSTSHTYTTPPYDDAETYV | |
| PolyA tail | 100 nt | |

V5_NGM N166_EBV_gp350_001

| SEQ ID NO: 171 consists of from 5′ end to 3′ end: | | 171 |
|---|---|---|
| 5′ UTR SEQ ID NO: 1, mRNA ORF SEQ ID NO: 62, and | | |
| 3′ UTR SEQ ID NO: 3 | | |
| Chemistry | 1-methylpseudouridine | |
| Cap | 7mG(5′)ppp(5′)NlmpNp | |
| 5′ UTR | GGGAAAUAAGAGAGAAAAGAAGAGUAAGAAGAAAUAUA | 1 |
| | AGAGCCACC | |
| ORF of mRNA | AUGGAGGCAGCACUGCUGGUCUGCCAGUAUACAAUCCAG | 62 |
| Construct | UCGCUCAUUCAUCUGACAGGCGAGGACCCCGGCUUCUUU | |
| (excluding | AACGUGGAAAUCCCAGAGUUCCCUUUCUAUCCAACCUGU | |
| the stop | AACGUUUGCACUGCUGACGUGAACGUGACAAUCAAUUUC | |
| codon) | GACGUGGGAGGAAAGAAGCAUCAGCUUGAUCUGGAUUUC | |
| | GGCCAACUGACGCCACACACCAAAGCGGUGUACCAACCAA | |
| | GGGGUGCAUUUGGAGGGAGCGAGAAUGCUACAAAUCUGU | |
| | UCUUACUGGAACUGCUUGGUGCAGGAGAGCUGGCACUAA | |
| | CCAUGCGAAGCAAGAAGCUCCCCAUCAACGUUACCACCGG | |
| | GGAAGAACAGCAAGUCAGCCUUGAAUCCGUGGAUGUGUA | |
| | CUUUCAGGAUGUUUUCGGCACCAUGUGGUGUCACCACGC | |
| | UGAGAUGCAGAAUCCCGUGUAUCUCAUACCCGAGACUGU | |
| | ACCCUACAUCAAGUGGGAUAAUUGCAAUUCAGCGAAUAU | |
| | UACGGCUGUGGUGAGGGCCCAGGGCUUGGACGUGACUCU | |
| | GCCCUUAUCUCUACCUACUUCUGCCCAAGACUCCAAUUUC | |
| | UCUGUCAAGACCGAGAUGCUCGGGAAUGAGAUCGAUAUC | |
| | GAGUGCAUCAUGGAGGACGGUGAGAUAAGCCAGGUUCUG | |
| | CCCGGCGACAACAAGUUCAAUAUCACUUGUUCUGGCUAC | |
| | GAGUCCCAUGUGCCUAGUGGUGGCAUACUCACAAGUACU | |
| | UCUCCCGUAGCCACGCCCAUUCCCGGAACCGGAUACGCCU | |
| | ACAGUCUGCGUCUGACCCCACGGCCUGUGUCCAGAUUCCU | |
| | GGGUAACAAUAGUAUCUUAUACGUGUUUUAUAGCGGAAA | |
| | CGGCCCUAAAGCGUCCGGAGGGGACUAUUGUAUUCAGAG | |
| | UAAUAUCGUUUUCUCUGAUGAGAUUCCUGCCAGUCAGGA | |
| | CAUGCCGACAAACACAACUGAUAUUACCUACGUGGGCGA | |
| | CAAUGCCACGUAUUCAGUGCCCAUGGUCACGAGCGAGGA | |
| | CGCCAAUUCACCAAAUGUUACUGUAACAGCUUUCUGGGC | |
| | CUGGCCAAAUAACACUGAGACUGACUUCAAAUGUAAGUG | |
| | GACUUUGACCUCUGGAACUCCGUCGGGUUGCGAGAAUAU | |
| | CAGCGGGGCCUUUGCUUCCAACAGGACUUUCGACAUCAC | |
| | UGUCUCAGGGCUGGGGACAGCACCGAAGACAUUAAUCAU | |
| | AACACGGACCGCCACCAACGCCACGACUACAACCCAUAAG | |
| | GUGAUCUUUUCCAAGGCACCUGAGUCCACCACUACCUCCC | |
| | CGACUCUUAACACUACGGGCUUCGCUGAUCCCAACACCAC | |
| | UACGGGGUUGCCUAGCUCGACACAUGUGCCGACGAACCU | |
| | GACUGCCCCUGCAUCGACCGGGCCCACAGUUUCGACCGCC | |
| | GAUGUGACAUCACCAACGCCCGCAGGUACAACCUCAGGC | |
| | GCCAGCCCAGUGACCCCUUCCCCAAGCCCCUGGGAUAAUG | |
| | GAACGGAGUCCAAGGCUCCUGAUAUGACUUCCUCUACCA | |
| | GCCCCGUGACUACACCCACUCCCAACGCAACUAGCCCAAC | |
| | CCCAGCUGUGACGACGCCCACCCCGAACGCGACAUCUCCC | |
| | ACACCUGCUGUGACAACCCCAACCCCUAACGCCACUAGCC | |
| | CUACCCUAGGUAAGACCAGUCCGACUAGCGCCGUUACAA | |
| | CCCCUACCCCUAACGCAACCGGCCCGACCGUGGGCGAGAC | |
| | UUCCCCGCAAGCCAAUGCGACAAAUCACACAUUGGGCGG | |
| | GACCUCUCCUACACCAGUCGUUACAUCUCAGCCUAAGAAC | |
| | GCUACCUCCGCUGUCACUACCGGACAGCACAACAUCACCA | |
| | GCUCAAGCACGAGUUCCAUGAGCUUGCGGCCGAGCUCAA | |
| | AUCCCGAGACCCUAUCACCAUCCACAUCAGACAACAGUAC | |
| | UUCACACAUGCCACUCUUGACGAGCGCUCACCCCACCGGC | |
| | GGCGAGAACAUCACCCAGGUGACUCCGGCGUCUAUUUCC | |
| | ACCCACCACGUCAGCACGUCGUCUCCCGCACCGAGACCAG | |
| | GGACGACUUCUCAGGCCAGUGGGCCUGGCAACUCCUCUA | |
| | CAAGCACAAAGCCAGGCGAAGUUAACGUGACAAAGGGAA | |
| | CGCCUCCCCAGAACGCAACCAGUCCUCAGGCGCCCAGCGG | |
| | GCAGAAGACUGCGGUGCCAACUGUGACCAGCACCGGUGG | |
| | CAAGGCCAACUCAACAACUGGAGGCAAGCAUACGACGGG | |
| | GCACGGCGCCCGGACCUCCACUGAACCCACGACCGAUUAC | |
| | GGAGGUGACAGCACAACACCGCGGCCACGAUAUAAUGCC | |
| | ACCACUUAUCUGCCACCAUCCACAAGCUCCAAGCUGCGGC | |
| | CACGGUGGACCUUCACAAGCCCACCCGUGACGACUGCCCA | |
| | AGCGACGGUGCCAGUGCCACCUACAAGCCAGCCACGCUUC | |
| | UCCAACCUUAGUAUGCUCGUUCUCCAGUGGGCCAGCCUU | |
| | GCUGUUCUGACCCUCCUCCUGCUGCUCGUGAUGGCCGAU | |
| | UGCGCCUUUAGGAGAAACCUCAGCACUAGCCACACGUAC | |
| | ACCACGCCGCCCUACGAUGACGCCGAGACUUACGUC | |
| 3′ UTR | UGAUAAUAGGCUGGAGCCUCGGUGGCCAUGCUUCUUGCC | 3 |
| | CCUUGGGCCUCCCCCCAGCCCCUCCUCCCCUUCCUGCACC | |
| | CGUACCCCCGUGGUCUUUGAAUAAAGUCUGAGUGGGCGG | |
| | C | |
| Corresponding | MEAALLVCQYTIQSLIHLTGEDPGFFNVEIPEFPFYPTCNVCTA | 63 |
| amino acid | DVNVTINFDVGGKKHQLDLDFGQLTPHTKAVYQPRGAFGGS | |
| sequence | ENATNLFLLELLGAGELALTMRSKKLPINVTTGEEQQVSLESV | |
| | DVYFQDVFGTMWCHHAEMQNPVYLIPETVPYIKWDNCNSAN | |
| | ITAVVRAQGLDVTLPLSLPTSAQDSNFSVKTEMLGNEIDIECIM | |
| | EDGEISQVLPGDNKFNITCSGYESHVPSGGILTSTSPVATPIPGT | |
| | GYAYSLRLTPRPVSRFLGNNSILYVFYSGNGPKASGGDYCIQS | |
| | NIVFSDEIPASQDMPTNTTDITYVGDNATYSVPMVTSEDANSP | |
| | NVTVTAFWAWPNNTETDFKCKWTLTSGTPSGCENISGAFASN | |
| | RTFDITVSGLGTAPKTLIITRTATNATTTTHKVIFSKAPESTTTS | |
| | PTLNTTGFADPNTTTGLPSSTHVPTNLTAPASTGPTVSTADVTS | |
| | PTPAGTTSGASPVTPSPSPWDNGTESKAPDMTSSTSPVTTPTPN | |
| | ATSPTPAVTTPTPNATSPTPAVTTPTPNATSPTLGKTSPTSAVT | |
| | TPTPNATGPTVGETSPQANATNHTLGGTSPTPVVTSQPKNATS | |
| | AVTTGQHNITSSSTSSMSLRPSSNPETLSPSTSDNSTSHMPLLTS | |
| | AHPTGGENITQVTPASISTHHVSTSSPAPRPGTTSQASGPGNSS | |
| | TSTKPGEVNVTKGTPPQNATSPQAPSGQKTAVPTVTSTGGKA | |
| | NSTTGGKHTTGHGARTSTEPTTDYGGDSTTPRPRYNATTYLPP | |
| | STSSKLRPRWTFTSPPVTTAQATVPVPPTSQPRFSNLSMLVLQ | |
| | WASLAVLTLLLLLVMADCAFRRNLSTSHTYTTPPYDDAETYV | |
| PolyA tail | 100 nt | |

V6_NGM N195_EBV_gp350_001

| SEQ ID NO: 172 consists of from 5′ end to 3′ end: | | 172 |
|---|---|---|
| 5′ UTR SEQ ID NO: 1, mRNA ORF SEQ ID NO: 64, and | | |
| 3′ UTR SEQ ID NO: 3 | | |
| Chemistry | 1-methylpseudouridine | |
| Cap | 7mG(5′)ppp(5′)NlmpNp | |
| 5′ UTR | GGGAAAUAAGAGAGAAAAGAAGAGUAAGAAGAAAUAUA | 1 |
| | AGAGCCACC | |
| ORF of mRNA | AUGGAGGCAGCACUGCUGGUCUGCCAGUAUACAAUCCAG | 64 |
| Construct | UCGCUCAUUCAUCUGACAGGCGAGGACCCCGGCUUCUUU | |
| (excluding | AACGUGGAAAUCCCAGAGUUCCCUUUCUAUCCAACCUGU | |
| the stop | AACGUUUGCACUGCUGACGUGAACGUGACAAUCAAUUUC | |
| codon) | GACGUGGGAGGAAAGAAGCAUCAGCUUGAUCUGGAUUUC | |
| | GGCCAACUGACGCCACACACCAAAGCGGUGUACCAACCAA | |
| | GGGGUGCAUUUGGAGGGAGCGAGAAUGCUACAAAUCUGU | |
| | UCUUACUGGAACUGCUUGGUGCAGGAGAGCUGGCACUAA | |
| | CCAUGCGAAGCAAGAAGCUCCCCAUCAACGUUACCACCGG | |
| | GGAAGAACAGCAAGUCAGCCUUGAAUCCGUGGAUGUGUA | |
| | CUUUCAGGAUGUUUUCGGCACCAUGUGGUGUCACCACGC | |
| | UGAGAUGCAGAAUCCCGUGUAUCUCAUACCCGAGACUGU | |
| | ACCCUACAUCAAGUGGGAUAAUUGCAAUUCAACUAAUAU | |
| | UACGGCUGUGGUGAGGGCCCAGGGCUUGGACGUGACUCU | |
| | GCCCUUAUCUCUACCUACUUCUGCCCAAGACUCCAAUUUC | |
| | GCGGUCAAGACCGAGAUGCUCGGGAAUGAGAUCGAUAUC | |
| | GAGUGCAUCAUGGAGGACGGUGAGAUAAGCCAGGUUCUG | |
| | CCCGGCGACAACAAGUUCAAUAUCACUUGUUCUGGCUAC | |
| | GAGUCCCAUGUGCCUAGUGGUGGCAUACUCACAAGUACU | |
| | UCUCCCGUAGCCACGCCCAUUCCCGGAACCGGAUACGCCU | |
| | ACAGUCUGCGUCUGACCCCACGGCCUGUGUCCAGAUUCCU | |
| | GGGUAACAAUAGUAUCUUAUACGUGUUUUAUAGCGGAAA | |
| | CGGCCCUAAAGCGUCCGGAGGGGACUAUUGUAUUCAGAG | |
| | UAAUAUCGUUUUCUCUGAUGAGAUUCCUGCCAGUCAGGA | |
| | CAUGCCGACAAACACAACUGAUAUUACCUACGUGGGCGA | |
| | CAAUGCCACGUAUUCAGUGCCCAUGGUCACGAGCGAGGA | |
| | CGCCAAUUCACCAAAUGUUACUGUAACAGCUUUCUGGGC | |
| | CUGGCCAAAUAACACUGAGACUGACUUCAAAUGUAAGUG | |
| | GACUUUGACCUCUGGAACUCCGUCGGGUUGCGAGAAUAU | |
| | CAGCGGGGCCUUUGCUUCCAACAGGACUUUCGACAUCAC | |
| | UGUCUCAGGGCUGGGGACAGCACCGAAGACAUUAAUCAU | |
| | AACACGGACCGCCACCAACGCCACGACUACAACCCAUAAG | |
| | GUGAUCUUUUCCAAGGCACCUGAGUCCACCACUACCUCCC | |
| | CGACUCUUAACACUACGGGCUUCGCUGAUCCCAACACCAC | |
| | UACGGGGUUGCCUAGCUCGACACAUGUGCCGACGAACCU | |
| | GACUGCCCCUGCAUCGACCGGGCCCACAGUUUCGACCGCC | |
| | GAUGUGACAUCACCAACGCCCGCAGGUACAACCUCAGGC | |
| | GCCAGCCCAGUGACCCCUUCCCCAAGCCCCUGGGAUAAUG | |
| | GAACGGAGUCCAAGGCUCCUGAUAUGACUUCCUCUACCA | |
| | GCCCCGUGACUACACCCACUCCCAACGCAACUAGCCCAAC | |
| | CCCAGCUGUGACGACGCCCACCCCGAACGCGACAUCUCCC | |
| | ACACCUGCUGUGACAACCCCAACCCCUAACGCCACUAGCC | |
| | CUACCCUAGGUAAGACCAGUCCGACUAGCGCCGUUACAA | |
| | CCCCUACCCCUAACGCAACCGGCCCGACCGUGGGCGAGAC | |
| | UUCCCCGCAAGCCAAUGCGACAAAUCACACAUUGGGCGG | |
| | GACCUCUCCUACACCAGUCGUUACAUCUCAGCCUAAGAAC | |
| | GCUACCUCCGCUGUCACUACCGGACAGCACAACAUCACCA | |
| | GCUCAAGCACGAGUUCCAUGAGCUUGCGGCCGAGCUCAA | |
| | AUCCCGAGACCCUAUCACCAUCCACAUCAGACAACAGUAC | |
| | UUCACACAUGCCACUCUUGACGAGCGCUCACCCCACCGGC | |
| | GGCGAGAACAUCACCCAGGUGACUCCGGCGUCUAUUUCC | |
| | ACCCACCACGUCAGCACGUCGUCUCCCGCACCGAGACCAG | |
| | GGACGACUUCUCAGGCCAGUGGGCCUGGCAACUCCUCUA | |
| | CAAGCACAAAGCCAGGCGAAGUUAACGUGACAAAGGGAA | |
| | CGCCUCCCCAGAACGCAACCAGUCCUCAGGCGCCCAGCGG | |
| | GCAGAAGACUGCGGUGCCAACUGUGACCAGCACCGGUGG | |
| | CAAGGCCAACUCAACAACUGGAGGCAAGCAUACGACGGG | |
| | GCACGGCGCCCGGACCUCCACUGAACCCACGACCGAUUAC | |
| | GGAGGUGACAGCACAACACCGCGGCCACGAUAUAAUGCC | |
| | ACCACUUAUCUGCCACCAUCCACAAGCUCCAAGCUGCGGC | |
| | CACGGUGGACCUUCACAAGCCCACCCGUGACGACUGCCCA | |
| | AGCGACGGUGCCAGUGCCACCUACAAGCCAGCCACGCUUC | |
| | UCCAACCUUAGUAUGCUCGUUCUCCAGUGGGCCAGCCUU | |
| | GCUGUUCUGACCCUCCUCCUGCUGCUCGUGAUGGCCGAU | |
| | UGCGCCUUUAGGAGAAACCUCAGCACUAGCCACACGUAC | |
| | ACCACGCCGCCCUACGAUGACGCCGAGACUUACGUC | |
| 3′UTR | UGAUAAUAGGCUGGAGCCUCGGUGGCCAUGCUUCUUGCC | 3 |
| | CCUUGGGCCUCCCCCCAGCCCCUCCUCCCCUUCCUGCACC | |
| | CGUACCCCCGUGGUCUUUGAAUAAAGUCUGAGUGGGCGG | |
| | C | |
| Corresponding | MEAALLVCQYTIQSLIHLTGEDPGFFNVEIPEFPFYPTCNVCTA | 65 |
| amino acid | DVNVTINFDVGGKKHQLDLDFGQLTPHTKAVYQPRGAFGGS | |
| sequence | ENATNLFLLELLGAGELALTMRSKKLPINVTTGEEQQVSLESV | |
| | DVYFQDVFGTMWCHHAEMQNPVYLIPETVPYIKWDNCNSTN | |
| | ITAVVRAQGLDVTLPLSLPTSAQDSNFAVKTEMLGNEIDIECI | |
| | MEDGEISQVLPGDNKFNITCSGYESHVPSGGILTSTSPVATPIPG | |
| | TGYAYSLRLTPRPVSRFLGNNSILYVFYSGNGPKASGGDYCIQ | |
| | SNIVFSDEIPASQDMPTNTTDITYVGDNATYSVPMVTSEDANS | |
| | PNVTVTAFWAWPNNTETDFKCKWTLTSGTPSGCENISGAFAS | |
| | NRTFDITVSGLGTAPKTLIITRTATNATTTTHKVIFSKAPESTTT | |
| | SPTLNTTGFADPNTTTGLPSSTHVPTNLTAPASTGPTVSTADVT | |
| | SPTPAGTTSGASPVTPSPSPWDNGTESKAPDMTSSTSPVTTPTP | |
| | NATSPTPAVTTPTPNATSPTPAVTTPTPNATSPTLGKTSPTSAV | |
| | TTPTPNATGPTVGETSPQANATNHTLGGTSPTPVVTSQPKNAT | |
| | SAVTTGQHNITSSSTSSMSLRPSSNPETLSPSTSDNSTSHMPLLT | |
| | SAHPTGGENITQVTPASISTHHVSTSSPAPRPGTTSQASGPGNS | |
| | STSTKPGEVNVTKGTPPQNATSPQAPSGQKTAVPTVTSTGGK | |
| | ANSTTGGKHTTGHGARTSTEPTTDYGGDSTTPRPRYNATTYL | |
| | PPSTSSKLRPRWTFTSPPVTTAQATVPVPPTSQPRFSNLSMLVL | |
| | QWASLAVLTLLLLLVMADCAFRRNLSTSHTYTTPPYDDAETY | |
| | V | |
| PolyA tail | 100 nt | |

V7_NGM N229_EBV_gp350_001

| SEQ ID NO: 173 consists of from 5′ end to 3′ end: | | 173 |
|---|---|---|
| 5′ UTR SEQ ID NO: 1, mRNA ORF SEQ ID NO: 66, and | | |
| 3′ UTR SEQ ID NO: 3 | | |
| Chemistry | 1-methylpseudouridine | |
| Cap | 7mG(5′)ppp(5′)NlmpNp | |
| 5′ UTR | GGGAAAUAAGAGAGAAAAGAAGAGUAAGAAGAAAUAUA | 1 |
| | AGAGCCACC | |
| ORF of mRNA | AUGGAGGCAGCACUGCUGGUCUGCCAGUAUACAAUCCAG | 66 |
| Construct | UCGCUCAUUCAUCUGACAGGCGAGGACCCCGGCUUCUUU | |
| (excluding | AACGUGGAAAUCCCAGAGUUCCCUUUCUAUCCAACCUGU | |
| the stop | AACGUUUGCACUGCUGACGUGAACGUGACAAUCAAUUUC | |
| codon) | GACGUGGGAGGAAAGAAGCAUCAGCUUGAUCUGGAUUUC | |
| | GGCCAACUGACGCCACACACCAAAGCGGUGUACCAACCAA | |
| | GGGGUGCAUUUGGAGGGAGCGAGAAUGCUACAAAUCUGU | |
| | UCUUACUGGAACUGCUUGGUGCAGGAGAGCUGGCACUAA | |
| | CCAUGCGAAGCAAGAAGCUCCCCAUCAACGUUACCACCGG | |
| | GGAAGAACAGCAAGUCAGCCUUGAAUCCGUGGAUGUGUA | |
| | CUUUCAGGAUGUUUUCGGCACCAUGUGGUGUCACCACGC | |
| | UGAGAUGCAGAAUCCCGUGUAUCUCAUACCCGAGACUGU | |
| | ACCCUACAUCAAGUGGGAUAAUUGCAAUUCAACUAAUAU | |
| | UACGGCUGUGGUGAGGGCCCAGGGCUUGGACGUGACUCU | |
| | GCCCUUAUCUCUACCUACUUCUGCCCAAGACUCCAAUUUC | |
| | UCUGUCAAGACCGAGAUGCUCGGGAAUGAGAUCGAUAUC | |
| | GAGUGCAUCAUGGAGGACGGUGAGAUAAGCCAGGUUCUG | |
| | CCCGGCGACAACAAGUUCAAUAUCGCGUGUUCUGGCUAC | |
| | GAGUCCCAUGUGCCUAGUGGUGGCAUACUCACAAGUACU | |
| | UCUCCCGUAGCCACGCCCAUUCCCGGAACCGGAUACGCCU | |
| | ACAGUCUGCGUCUGACCCCACGGCCUGUGUCCAGAUUCCU | |
| | GGGUAACAAUAGUAUCUUAUACGUGUUUUAUAGCGGAAA | |
| | CGGCCCUAAAGCGUCCGGAGGGGACUAUUGUAUUCAGAG | |
| | UAAUAUCGUUUUCUCUGAUGAGAUUCCUGCCAGUCAGGA | |
| | CAUGCCGACAAACACAACUGAUAUUACCUACGUGGGCGA | |
| | CAAUGCCACGUAUUCAGUGCCCAUGGUCACGAGCGAGGA | |
| | CGCCAAUUCACCAAAUGUUACUGUAACAGCUUUCUGGGC | |
| | CUGGCCAAAUAACACUGAGACUGACUUCAAAUGUAAGUG | |
| | GACUUUGACCUCUGGAACUCCGUCGGGUUGCGAGAAUAU | |
| | CAGCGGGGCCUUUGCUUCCAACAGGACUUUCGACAUCAC | |
| | UGUCUCAGGGCUGGGGACAGCACCGAAGACAUUAAUCAU | |
| | AACACGGACCGCCACCAACGCCACGACUACAACCCAUAAG | |
| | GUGAUCUUUUCCAAGGCACCUGAGUCCACCACUACCUCCC | |
| | CGACUCUUAACACUACGGGCUUCGCUGAUCCCAACACCAC | |
| | UACGGGGUUGCCUAGCUCGACACAUGUGCCGACGAACCU | |
| | GACUGCCCCUGCAUCGACCGGGCCCACAGUUUCGACCGCC | |
| | GAUGUGACAUCACCAACGCCCGCAGGUACAACCUCAGGC | |
| | GCCAGCCCAGUGACCCCUUCCCCAAGCCCCUGGGAUAAUG | |
| | GAACGGAGUCCAAGGCUCCUGAUAUGACUUCCUCUACCA | |
| | GCCCCGUGACUACACCCACUCCCAACGCAACUAGCCCAAC | |
| | CCCAGCUGUGACGACGCCCACCCCGAACGCGACAUCUCCC | |
| | ACACCUGCUGUGACAACCCCAACCCCUAACGCCACUAGCC | |
| | CUACCCUAGGUAAGACCAGUCCGACUAGCGCCGUUACAA | |
| | CCCCUACCCCUAACGCAACCGGCCCGACCGUGGGCGAGAC | |
| | UUCCCCGCAAGCCAAUGCGACAAAUCACACAUUGGGCGG | |
| | GACCUCUCCUACACCAGUCGUUACAUCUCAGCCUAAGAAC | |
| | GCUACCUCCGCUGUCACUACCGGACAGCACAACAUCACCA | |
| | GCUCAAGCACGAGUUCCAUGAGCUUGCGGCCGAGCUCAA | |
| | AUCCCGAGACCCUAUCACCAUCCACAUCAGACAACAGUAC | |
| | UUCACACAUGCCACUCUUGACGAGCGCUCACCCCACCGGC | |
| | GGCGAGAACAUCACCCAGGUGACUCCGGCGUCUAUUUCC | |
| | ACCCACCACGUCAGCACGUCGUCUCCCGCACCGAGACCAG | |
| | GGACGACUUCUCAGGCCAGUGGGCCUGGCAACUCCUCUA | |
| | CAAGCACAAAGCCAGGCGAAGUUAACGUGACAAAGGGAA | |
| | CGCCUCCCCAGAACGCAACCAGUCCUCAGGCGCCCAGCGG | |
| | GCAGAAGACUGCGGUGCCAACUGUGACCAGCACCGGUGG | |
| | CAAGGCCAACUCAACAACUGGAGGCAAGCAUACGACGGG | |
| | GCACGGCGCCCGGACCUCCACUGAACCCACGACCGAUUAC | |
| | GGAGGUGACAGCACAACACCGCGGCCACGAUAUAAUGCC | |
| | ACCACUUAUCUGCCACCAUCCACAAGCUCCAAGCUGCGGC | |
| | CACGGUGGACCUUCACAAGCCCACCCGUGACGACUGCCCA | |
| | AGCGACGGUGCCAGUGCCACCUACAAGCCAGCCACGCUUC | |
| | UCCAACCUUAGUAUGCUCGUUCUCCAGUGGGCCAGCCUU | |
| | GCUGUUCUGACCCUCCUCCUGCUGCUCGUGAUGGCCGAU | |
| | UGCGCCUUUAGGAGAAACCUCAGCACUAGCCACACGUAC | |
| | ACCACGCCGCCCUACGAUGACGCCGAGACUUACGUC | |
| 3′ UTR | UGAUAAUAGGCUGGAGCCUCGGUGGCCAUGCUUCUUGCC | 3 |
| | CCUUGGGCCUCCCCCCAGCCCCUCCUCCCCUUCCUGCACC | |
| | CGUACCCCCGUGGUCUUUGAAUAAAGUCUGAGUGGGCGG | |
| | C | |
| Corresponding | MEAALLVCQYTIQSLIHLTGEDPGFFNVEIPEFPFYPTCNVCTA | 67 |
| amino acid | DVNVTINFDVGGKKHQLDLDFGQLTPHTKAVYQPRGAFGGS | |
| sequence | ENATNLFLLELLGAGELALTMRSKKLPINVTTGEEQQVSLESV | |
| | DVYFQDVFGTMWCHHAEMQNPVYLIPETVPYIKWDNCNSTN | |
| | ITAVVRAQGLDVTLPLSLPTSAQDSNFSVKTEMLGNEIDIECIM | |
| | EDGEISQVLPGDNKFNIACSGYESHVPSGGILTSTSPVATPIPGT | |
| | GYAYSLRLTPRPVSRFLGNNSILYVFYSGNGPKASGGDYCIQS | |
| | NIVFSDEIPASQDMPTNTTDITYVGDNATYSVPMVTSEDANSP | |
| | NVTVTAFWAWPNNTETDFKCKWTLTSGTPSGCENISGAFASN | |
| | RTFDITVSGLGTAPKTLIITRTATNATTTTHKVIFSKAPESTTTS | |
| | PTLNTTGFADPNTTTGLPSSTHVPTNLTAPASTGPTVSTADVTS | |
| | PTPAGTTSGASPVTPSPSPWDNGTESKAPDMTSSTSPVTTPTPN | |
| | ATSPTPAVTTPTPNATSPTPAVTTPTPNATSPTLGKTSPTSAVT | |
| | TPTPNATGPTVGETSPQANATNHTLGGTSPTPVVTSQPKNATS | |
| | AVTTGQHNITSSSTSSMSLRPSSNPETLSPSTSDNSTSHMPLLTS | |
| | AHPTGGENITQVTPASISTHHVSTSSPAPRPGTTSQASGPGNSS | |
| | TSTKPGEVNVTKGTPPQNATSPQAPSGQKTAVPTVTSTGGKA | |
| | NSTTGGKHTTGHGARTSTEPTTDYGGDSTTPRPRYNATTYLPP | |
| | STSSKLRPRWTFTSPPVTTAQATVPVPPTSQPRFSNLSMLVLQ | |
| | WASLAVLTLLLLLVMADCAFRRNLSTSHTYTTPPYDDAETYV | |
| PolyA tail | 100 nt | |

V8_NGM N345_EBV_gp350_001

| SEQ ID NO: 174 consists of from 5′ end to 3′ end: | | 174 |
|---|---|---|
| 5′ UTR SEQ ID NO: 1, mRNA ORF SEQ ID NO: 68, and | | |
| 3′ UTR SEQ ID NO: 3 | | |
| Chemistry | 1-methylpseudouridine | |
| Cap | 7mG(5′)ppp(5′)NlmpNp | |
| 5′ UTR | GGGAAAUAAGAGAGAAAAGAAGAGUAAGAAGAAAUAUA | 1 |
| | AGAGCCACC | |
| ORF of mRNA | AUGGAGGCAGCACUGCUGGUCUGCCAGUAUACAAUCCAG | 68 |
| Construct | UCGCUCAUUCAUCUGACAGGCGAGGACCCCGGCUUCUUU | |
| (excluding | AACGUGGAAAUCCCAGAGUUCCCUUUCUAUCCAACCUGU | |
| the stop | AACGUUUGCACUGCUGACGUGAACGUGACAAUCAAUUUC | |
| codon) | GACGUGGGAGGAAAGAAGCAUCAGCUUGAUCUGGAUUUC | |
| | GGCCAACUGACGCCACACACCAAAGCGGUGUACCAACCAA | |
| | GGGGUGCAUUUGGAGGGAGCGAGAAUGCUACAAAUCUGU | |
| | UCUUACUGGAACUGCUUGGUGCAGGAGAGCUGGCACUAA | |
| | CCAUGCGAAGCAAGAAGCUCCCCAUCAACGUUACCACCGG | |
| | GGAAGAACAGCAAGUCAGCCUUGAAUCCGUGGAUGUGUA | |
| | CUUUCAGGAUGUUUUCGGCACCAUGUGGUGUCACCACGC | |
| | UGAGAUGCAGAAUCCCGUGUAUCUCAUACCCGAGACUGU | |
| | ACCCUACAUCAAGUGGGAUAAUUGCAAUUCAACUAAUAU | |
| | UACGGCUGUGGUGAGGGCCCAGGGCUUGGACGUGACUCU | |
| | GCCCUUAUCUCUACCUACUUCUGCCCAAGACUCCAAUUUC | |
| | UCUGUCAAGACCGAGAUGCUCGGGAAUGAGAUCGAUAUC | |
| | GAGUGCAUCAUGGAGGACGGUGAGAUAAGCCAGGUUCUG | |
| | CCCGGCGACAACAAGUUCAAUAUCACUUGUUCUGGCUAC | |
| | GAGUCCCAUGUGCCUAGUGGUGGCAUACUCACAAGUACU | |
| | UCUCCCGUAGCCACGCCCAUUCCCGGAACCGGAUACGCCU | |
| | ACAGUCUGCGUCUGACCCCACGGCCUGUGUCCAGAUUCCU | |
| | GGGUAACAAUAGUAUCUUAUACGUGUUUUAUAGCGGAAA | |
| | CGGCCCUAAAGCGUCCGGAGGGGACUAUUGUAUUCAGAG | |
| | UAAUAUCGUUUUCUCUGAUGAGAUUCCUGCCAGUCAGGA | |
| | CAUGCCGACAAACACAACUGAUAUUACCUACGUGGGCGA | |
| | CAAUGCCACGUAUUCAGUGCCCAUGGUCACGAGCGAGGA | |
| | CGCCAAUUCACCAAAUGUUGCGGUAACAGCUUUCUGGGC | |
| | CUGGCCAAAUAACACUGAGACUGACUUCAAAUGUAAGUG | |
| | GACUUUGACCUCUGGAACUCCGUCGGGUUGCGAGAAUAU | |
| | CAGCGGGGCCUUUGCUUCCAACAGGACUUUCGACAUCAC | |
| | UGUCUCAGGGCUGGGGACAGCACCGAAGACAUUAAUCAU | |
| | AACACGGACCGCCACCAACGCCACGACUACAACCCAUAAG | |
| | GUGAUCUUUUCCAAGGCACCUGAGUCCACCACUACCUCCC | |
| | CGACUCUUAACACUACGGGCUUCGCUGAUCCCAACACCAC | |
| | UACGGGGUUGCCUAGCUCGACACAUGUGCCGACGAACCU | |
| | GACUGCCCCUGCAUCGACCGGGCCCACAGUUUCGACCGCC | |
| | GAUGUGACAUCACCAACGCCCGCAGGUACAACCUCAGGC | |
| | GCCAGCCCAGUGACCCCUUCCCCAAGCCCCUGGGAUAAUG | |
| | GAACGGAGUCCAAGGCUCCUGAUAUGACUUCCUCUACCA | |
| | GCCCCGUGACUACACCCACUCCCAACGCAACUAGCCCAAC | |
| | CCCAGCUGUGACGACGCCCACCCCGAACGCGACAUCUCCC | |
| | ACACCUGCUGUGACAACCCCAACCCCUAACGCCACUAGCC | |
| | CUACCCUAGGUAAGACCAGUCCGACUAGCGCCGUUACAA | |
| | CCCCUACCCCUAACGCAACCGGCCCGACCGUGGGCGAGAC | |
| | UUCCCCGCAAGCCAAUGCGACAAAUCACACAUUGGGCGG | |
| | GACCUCUCCUACACCAGUCGUUACAUCUCAGCCUAAGAAC | |
| | GCUACCUCCGCUGUCACUACCGGACAGCACAACAUCACCA | |
| | GCUCAAGCACGAGUUCCAUGAGCUUGCGGCCGAGCUCAA | |
| | AUCCCGAGACCCUAUCACCAUCCACAUCAGACAACAGUAC | |
| | UUCACACAUGCCACUCUUGACGAGCGCUCACCCCACCGGC | |
| | GGCGAGAACAUCACCCAGGUGACUCCGGCGUCUAUUUCC | |
| | ACCCACCACGUCAGCACGUCGUCUCCCGCACCGAGACCAG | |
| | GGACGACUUCUCAGGCCAGUGGGCCUGGCAACUCCUCUA | |
| | CAAGCACAAAGCCAGGCGAAGUUAACGUGACAAAGGGAA | |
| | CGCCUCCCCAGAACGCAACCAGUCCUCAGGCGCCCAGCGG | |
| | GCAGAAGACUGCGGUGCCAACUGUGACCAGCACCGGUGG | |
| | CAAGGCCAACUCAACAACUGGAGGCAAGCAUACGACGGG | |
| | GCACGGCGCCCGGACCUCCACUGAACCCACGACCGAUUAC | |
| | GGAGGUGACAGCACAACACCGCGGCCACGAUAUAAUGCC | |
| | ACCACUUAUCUGCCACCAUCCACAAGCUCCAAGCUGCGGC | |
| | CACGGUGGACCUUCACAAGCCCACCCGUGACGACUGCCCA | |
| | AGCGACGGUGCCAGUGCCACCUACAAGCCAGCCACGCUUC | |
| | UCCAACCUUAGUAUGCUCGUUCUCCAGUGGGCCAGCCUU | |
| | GCUGUUCUGACCCUCCUCCUGCUGCUCGUGAUGGCCGAU | |
| | UGCGCCUUUAGGAGAAACCUCAGCACUAGCCACACGUAC | |
| | ACCACGCCGCCCUACGAUGACGCCGAGACUUACGUC | |
| 3′ UTR | UGAUAAUAGGCUGGAGCCUCGGUGGCCAUGCUUCUUGCC | 3 |
| | CCUUGGGCCUCCCCCCAGCCCCUCCUCCCCUUCCUGCACC | |
| | CGUACCCCCGUGGUCUUUGAAUAAAGUCUGAGUGGGCGG | |
| | C | |
| Corresponding | MEAALLVCQYTIQSLIHLTGEDPGFFNVEIPEFPFYPTCNVCTA | 114 |
| amino acid | DVNVTINFDVGGKKHQLDLDFGQLTPHTKAVYQPRGAFGGS | |
| sequence | ENATNLFLLELLGAGELALTMRSKKLPINVTTGEEQQVSLESV | |
| | DVYFQDVFGTMWCHHAEMQNPVYLIPETVPYIKWDNCNSTN | |
| | ITAVVRAQGLDVTLPLSLPTSAQDSNFSVKTEMLGNEIDIECIM | |
| | EDGEISQVLPGDNKFNITCSGYESHVPSGGILTSTSPVATPIPGT | |
| | GYAYSLRLTPRPVSRFLGNNSILYVFYSGNGPKASGGDYCIQS | |
| | NIVFSDEIPASQDMPTNTTDITYVGDNATYSVPMVTSEDANSP | |
| | NVAVTAFWAWPNNTETDFKCKWTLTSGTPSGCENISGAFASN | |
| | RTFDITVSGLGTAPKTLIITRTATNATTTTHKVIFSKAPESTTTS | |
| | PTLNTTGFADPNTTTGLPSSTHVPTNLTAPASTGPTVSTADVTS | |
| | PTPAGTTSGASPVTPSPSPWDNGTESKAPDMTSSTSPVTTPTPN | |
| | ATSPTPAVTTPTPNATSPTPAVTTPTPNATSPTLGKTSPTSAVT | |
| | TPTPNATGPTVGETSPQANATNHTLGGTSPTPVVTSQPKNATS | |
| | AVTTGQHNITSSSTSSMSLRPSSNPETLSPSTSDNSTSHMPLLTS | |
| | AHPTGGENITQVTPASISTHHVSTSSPAPRPGTTSQASGPGNSS | |
| | TSTKPGEVNVTKGTPPQNATSPQAPSGQKTAVPTVTSTGGKA | |
| | NSTTGGKHTTGHGARTSTEPTTDYGGDSTTPRPRYNATTYLPP | |
| | STSSKLRPRWTFTSPPVTTAQATVPVPPTSQPRFSNLSMLVLQ | |
| | WASLAVLTLLLLLVMADCAFRRNLSTSHTYTTPPYDDAETYV | |
| PolyA tail | 100 nt | |

V9_NGM N411_EBV_gp350_001

| SEQ ID NO: 175 consists of from 5′ end to 3′ end: | | 175 |
|---|---|---|
| 5′ UTR SEQ ID NO: 1, mRNA ORF SEQ ID NO: 69, and | | |
| 3′ UTR SEQ ID NO: 3 | | |
| Chemistry | 1-methylpseudouridine | |
| Cap | 7mG(5′)ppp(5′)NlmpNp | |
| 5′ UTR | GGGAAAUAAGAGAGAAAAGAAGAGUAAGAAGAAAUAUA | 1 |
| | AGAGCCACC | |
| ORF of mRNA | AUGGAGGCAGCACUGCUGGUCUGCCAGUAUACAAUCCAG | 69 |
| Construct | UCGCUCAUUCAUCUGACAGGCGAGGACCCCGGCUUCUUU | |
| (excluding | AACGUGGAAAUCCCAGAGUUCCCUUUCUAUCCAACCUGU | |
| the stop | AACGUUUGCACUGCUGACGUGAACGUGACAAUCAAUUUC | |
| codon) | GACGUGGGAGGAAAGAAGCAUCAGCUUGAUCUGGAUUUC | |
| | GGCCAACUGACGCCACACACCAAAGCGGUGUACCAACCAA | |
| | GGGGUGCAUUUGGAGGGAGCGAGAAUGCUACAAAUCUGU | |
| | UCUUACUGGAACUGCUUGGUGCAGGAGAGCUGGCACUAA | |
| | CCAUGCGAAGCAAGAAGCUCCCCAUCAACGUUACCACCGG | |
| | GGAAGAACAGCAAGUCAGCCUUGAAUCCGUGGAUGUGUA | |
| | CUUUCAGGAUGUUUUCGGCACCAUGUGGUGUCACCACGC | |
| | UGAGAUGCAGAAUCCCGUGUAUCUCAUACCCGAGACUGU | |
| | ACCCUACAUCAAGUGGGAUAAUUGCAAUUCAACUAAUAU | |
| | UACGGCUGUGGUGAGGGCCCAGGGCUUGGACGUGACUCU | |
| | GCCCUUAUCUCUACCUACUUCUGCCCAAGACUCCAAUUUC | |
| | UCUGUCAAGACCGAGAUGCUCGGGAAUGAGAUCGAUAUC | |
| | GAGUGCAUCAUGGAGGACGGUGAGAUAAGCCAGGUUCUG | |
| | CCCGGCGACAACAAGUUCAAUAUCACUUGUUCUGGCUAC | |
| | GAGUCCCAUGUGCCUAGUGGUGGCAUACUCACAAGUACU | |
| | UCUCCCGUAGCCACGCCCAUUCCCGGAACCGGAUACGCCU | |
| | ACAGUCUGCGUCUGACCCCACGGCCUGUGUCCAGAUUCCU | |
| | GGGUAACAAUAGUAUCUUAUACGUGUUUUAUAGCGGAAA | |
| | CGGCCCUAAAGCGUCCGGAGGGGACUAUUGUAUUCAGAG | |
| | UAAUAUCGUUUUCUCUGAUGAGAUUCCUGCCAGUCAGGA | |
| | CAUGCCGACAAACACAACUGAUAUUACCUACGUGGGCGA | |
| | CAAUGCCACGUAUUCAGUGCCCAUGGUCACGAGCGAGGA | |
| | CGCCAAUUCACCAAAUGUUACUGUAACAGCUUUCUGGGC | |
| | CUGGCCAAAUAACACUGAGACUGACUUCAAAUGUAAGUG | |
| | GACUUUGACCUCUGGAACUCCGUCGGGUUGCGAGAAUAU | |
| | CAGCGGGGCCUUUGCUUCCAACAGGACUUUCGACAUCAC | |
| | UGUCUCAGGGCUGGGGACAGCACCGAAGACAUUAAUCAU | |
| | AACACGGACCGCCACCAACGCCGCGACUACAACCCAUAAG | |
| | GUGAUCUUUUCCAAGGCACCUGAGUCCACCACUACCUCCC | |
| | CGACUCUUAACACUACGGGCUUCGCUGAUCCCAACACCAC | |
| | UACGGGGUUGCCUAGCUCGACACAUGUGCCGACGAACCU | |
| | GACUGCCCCUGCAUCGACCGGGCCCACAGUUUCGACCGCC | |
| | GAUGUGACAUCACCAACGCCCGCAGGUACAACCUCAGGC | |
| | GCCAGCCCAGUGACCCCUUCCCCAAGCCCCUGGGAUAAUG | |
| | GAACGGAGUCCAAGGCUCCUGAUAUGACUUCCUCUACCA | |
| | GCCCCGUGACUACACCCACUCCCAACGCAACUAGCCCAAC | |
| | CCCAGCUGUGACGACGCCCACCCCGAACGCGACAUCUCCC | |
| | ACACCUGCUGUGACAACCCCAACCCCUAACGCCACUAGCC | |
| | CUACCCUAGGUAAGACCAGUCCGACUAGCGCCGUUACAA | |
| | CCCCUACCCCUAACGCAACCGGCCCGACCGUGGGCGAGAC | |
| | UUCCCCGCAAGCCAAUGCGACAAAUCACACAUUGGGCGG | |
| | GACCUCUCCUACACCAGUCGUUACAUCUCAGCCUAAGAAC | |
| | GCUACCUCCGCUGUCACUACCGGACAGCACAACAUCACCA | |
| | GCUCAAGCACGAGUUCCAUGAGCUUGCGGCCGAGCUCAA | |
| | AUCCCGAGACCCUAUCACCAUCCACAUCAGACAACAGUAC | |
| | UUCACACAUGCCACUCUUGACGAGCGCUCACCCCACCGGC | |
| | GGCGAGAACAUCACCCAGGUGACUCCGGCGUCUAUUUCC | |
| | ACCCACCACGUCAGCACGUCGUCUCCCGCACCGAGACCAG | |
| | GGACGACUUCUCAGGCCAGUGGGCCUGGCAACUCCUCUA | |
| | CAAGCACAAAGCCAGGCGAAGUUAACGUGACAAAGGGAA | |
| | CGCCUCCCCAGAACGCAACCAGUCCUCAGGCGCCCAGCGG | |
| | GCAGAAGACUGCGGUGCCAACUGUGACCAGCACCGGUGG | |
| | CAAGGCCAACUCAACAACUGGAGGCAAGCAUACGACGGG | |
| | GCACGGCGCCCGGACCUCCACUGAACCCACGACCGAUUAC | |
| | GGAGGUGACAGCACAACACCGCGGCCACGAUAUAAUGCC | |
| | ACCACUUAUCUGCCACCAUCCACAAGCUCCAAGCUGCGGC | |
| | CACGGUGGACCUUCACAAGCCCACCCGUGACGACUGCCCA | |
| | AGCGACGGUGCCAGUGCCACCUACAAGCCAGCCACGCUUC | |
| | UCCAACCUUAGUAUGCUCGUUCUCCAGUGGGCCAGCCUU | |
| | GCUGUUCUGACCCUCCUCCUGCUGCUCGUGAUGGCCGAU | |
| | UGCGCCUUUAGGAGAAACCUCAGCACUAGCCACACGUAC | |
| | ACCACGCCGCCCUACGAUGACGCCGAGACUUACGUC | |
| 3′UTR | UGAUAAUAGGCUGGAGCCUCGGUGGCCAUGCUUCUUGCC | 3 |
| | CCUUGGGCCUCCCCCCAGCCCCUCCUCCCCUUCCUGCACC | |
| | CGUACCCCCGUGGUCUUUGAAUAAAGUCUGAGUGGGCGG | |
| | C | |
| Corresponding | MEAALLVCQYTIQSLIHLTGEDPGFFNVEIPEFPFYPTCNVCTA | 70 |
| amino acid | DVNVTINFDVGGKKHQLDLDFGQLTPHTKAVYQPRGAFGGS | |
| sequence | ENATNLFLLELLGAGELALTMRSKKLPINVTTGEEQQVSLESV | |
| | DVYFQDVFGTMWCHHAEMQNPVYLIPETVPYIKWDNCNSTN | |
| | ITAVVRAQGLDVTLPLSLPTSAQDSNFSVKTEMLGNEIDIECIM | |
| | EDGEISQVLPGDNKFNITCSGYESHVPSGGILTSTSPVATPIPGT | |
| | GYAYSLRLTPRPVSRFLGNNSILYVFYSGNGPKASGGDYCIQS | |
| | NIVFSDEIPASQDMPTNTTDITYVGDNATYSVPMVTSEDANSP | |
| | NVTVTAFWAWPNNTETDFKCKWTLTSGTPSGCENISGAFASN | |
| | RTFDITVSGLGTAPKTLIITRTATNAATTTHKVIFSKAPESTTTS | |
| | PTLNTTGFADPNTTTGLPSSTHVPTNLTAPASTGPTVSTADVTS | |
| | PTPAGTTSGASPVTPSPSPWDNGTESKAPDMTSSTSPVTTPTPN | |
| | ATSPTPAVTTPTPNATSPTPAVTTPTPNATSPTLGKTSPTSAVT | |
| | TPTPNATGPTVGETSPQANATNHTLGGTSPTPVVTSQPKNATS | |
| | AVTTGQHNITSSSTSSMSLRPSSNPETLSPSTSDNSTSHMPLLTS | |
| | AHPTGGENITQVTPASISTHHVSTSSPAPRPGTTSQASGPGNSS | |
| | TSTKPGEVNVTKGTPPQNATSPQAPSGQKTAVPTVTSTGGKA | |
| | NSTTGGKHTTGHGARTSTEPTTDYGGDSTTPRPRYNATTYLPP | |
| | STSSKLRPRWTFTSPPVTTAQATVPVPPTSQPRFSNLSMLVLQ | |
| | WASLAVLTLLLLLVMADCAFRRNLSTSHTYTTPPYDDAETYV | |
| PolyA tail | 100 nt | |

EBV gp42 (B95-8)_DX

| SEQ ID NO: 176 consists of from 5′ end to 3′ end: | | 176 |
|---|---|---|
| 5′ UTR SEQ ID NO: 1, mRNA ORF SEQ ID NO: 70, and | | |
| 3′ UTR SEQ ID NO: 3 | | |
| Chemistry | 1-methylpseudouridine | |
| Cap | 7mG(5′)ppp(5′)NlmpNp | |
| 5′ UTR | GGGAAAUAAGAGAGAAAAGAAGAGUAAGAAGAAAUAUA | 1 |
| | AGAGCCACC | |
| ORF of mRNA | AUGGUGAGCUUCAAGCAGGUGAGAGUGCCCCUGUUCACC | 71 |
| Construct | GCCAUCGCCCUGGUGAUCGUGCUGCUGCUGGCCUACUUCC | |
| (excluding | UGCCCCCCAGAGUGAGAGGCGGCGGCAGAGUGGCCGCCG | |
| the stop | CCGCCAUCACCUGGGUGCCCAAGCCCAACGUGGAGGUGU | |
| codon) | GGCCCGUGGACCCCCCACCCCCCGUGAACUUCAACAAGAC | |
| | CGCCGAGCAGGAGUACGGCGACAAGGAGGUGAAGCUGCC | |
| | CCACUGGACCCCCACCCUGCACACCUUCCAGGUGCCCCAG | |
| | AACUACACCAAGGCCAACUGCACCUACUGCAACACCAGAG | |
| | AGUACACCUUCAGCUACAAGGGCUGCUGCUUCUACUUCA | |
| | CCAAGAAGAAGCACACCUGGAACGGCUGCUUCCAGGCCU | |
| | GCGCCGAGCUGUACCCCUGCACCUACUUCUACGGCCCCAC | |
| | CCCCGACAUCCUGCCCGUGGUGACCAGAAACCUGAACGCC | |
| | AUCGAGAGCCUGUGGGUGGGCGUGUACAGAGUGGGCGAG | |
| | GGCAACUGGACCAGCCUGGACGGCGGCACCUUCAAGGUG | |
| | UACCAGAUCUUCGGCAGCCACUGCACCUACGUGAGCAAG | |
| | UUCAGCACCGUGCCCGUGAGCCACCACGAGUGCAGCUUCC | |
| | UGAAGCCCUGCCUGUGCGUGAGCCAGAGAAGCAACAGC | |
| 3′ UTR | UGAUAAUAGGCUGGAGCCUCGGUGGCCAUGCUUCUUGCC | 3 |
| | CCUUGGGCCUCCCCCCAGCCCCUCCUCCCCUUCCUGCACC | |
| | CGUACCCCCGUGGUCUUUGAAUAAAGUCUGAGUGGGCGG | |
| | C | |
| Corresponding | MVSFKQVRVPLFTAIALVIVLLLAYFLPPRVRGGGRVAAAAIT | 34 |
| amino acid | WVPKPNVEVWPVDPPPPVNFNKTAEQEYGDKEVKLPHWTPT | |
| sequence | LHTFQVPQNYTKANCTYCNTREYTFSYKGCCFYFTKKKHTW | |
| | NGCFQACAELYPCTYFYGPTPDILPVVTRNLNAIESLWVGVYR | |
| | VGEGNWTSLDGGTFKVYQIFGSHCTYVSKFSTVPVSHHECSFL | |
| | KPCLCVSQRSNS | |
| PolyA tail | 100 nt | |

EBV EBNA3 (B95-8)_RX

| SEQ ID NO: 177 consists of from 5′ end to 3′ end: | | 177 |
|---|---|---|
| 5′ UTR SEQ ID NO: 1, mRNA ORF SEQ ID NO: 72, and | | |
| 3′ UTR SEQ ID NO: 3 | | |
| Chemistry | 1-methylpseudouridine | |
| Cap | 7mG(5′)ppp(5′)NlmpNp | |
| 5′UTR | GGGAAAUAAGAGAGAAAAGAAGAGUAAGAAGAAAUAUA | 1 |
| | AGAGCCACC | |
| ORF of mRNA | AUGGACAAGGACAGGCCCGGCCCUCCCGCCUUGGACGACA | 72 |
| Construct | ACAUGGAGGAGGAGGUGCCCAGCACCAGCGUGGUGCAGG | |
| (excluding | AGCAGGUGAGCGCCGGCGACUGGGAGAACGUGUUAAUCG | |
| the stop | AGUUGAGCGACAGCAGCAGCGAGAAGGAGGCCGAGGACG | |
| codon) | CCCACCUGGAGCCCGCCCAGAAGGGCACCAAGAGGAAGA | |
| | GGGUGGACCACGACGCUGGCGGAUCUGCCCCUGCCAGGCC | |
| | CAUGCUGCCACCCCAGCCCGACCUGCCCGGCAGGGAGGCC | |
| | AUCCUGAGGAGGUUCCCACUGGACCUGAGGACCCUGCUG | |
| | CAGGCCAUCGGCGCCGCCGCCACCAGGAUCGACACCAGGG | |
| | CCAUCGACCAGUUCUUCGGCAGCCAGAUCAGCAACACCGA | |
| | GAUGUACAUCAUGUACGCCAUGGCCAUCAGACAAGCAAU | |
| | UAGGGAUCGACGCAGAAAUCCUGCCAGCAGGAGGGACCA | |
| | GGCCAAGUGGAGGCUGCAGACCCUGGCCGCCGGCUGGCCC | |
| | AUGGGCUACCAGGCCUACAGCAGCUGGAUGUACAGCUAC | |
| | ACCGACCACCAGACCACUCCGACCUUCGUGCACCUCCAGG | |
| | CUACCCUGGGCUGCACUGGCGGUCGCAGGUGCCACGUGA | |
| | CCUUCUCAGCGGGCACCUUCAAGCUGCCCAGGUGCACACC | |
| | UGGCGACAGGCAGUGGCUGUACGUGCAGAGCAGCGUGGG | |
| | CAACAUUGUUCAGAGUUGCAACCCCAGGUACAGCAUCUU | |
| | CUUCGACUACAUGGCGAUUCACAGGAGCCUGACCAAGAU | |
| | CUGGGAGGAAGUCCUGACCCCUGACCAGAGGGUGAGCUU | |
| | CAUGGAGUUCCUGGGCUUCCUGCAGAGGACCGACCUGAG | |
| | CUACAUCAAGAGCUUCGUGAGCGACGCCCUGGGCACCACC | |
| | AGCAUCCAGACUCCUUGGAUCGACGAUAACCCUAGCACC | |
| | GAAACCGCCCAGGCCUGGAACGCCGGUUUCCUGAGGGGC | |
| | AGGGCCUACGGCAUCGACCUGCUCCGGACCGAGGGCGAG | |
| | CACGUGGAGGGCGCCACCGGCGAGACUAGGGAGGAGAGC | |
| | GAGGACACUGAGAGCGACGGCGACGACGAGGAUCUGCCG | |
| | UGCAUCGUGAGCAGGGGCGGCCCCAAGGUGAAGAGGCCU | |
| | CCCAUCUUCAUCCGGAGGCUUCACAGGCUGCUGCUGAUG | |
| | AGGGCCGGCAAGCGUACUGAACAGGGCAAGGAGGUACUG | |
| | GAGAAGGCCAGGGGCAGCACAUAUGGCACCCCUAGACCG | |
| | CCUGUGCCCAAGCCGCGUCCUGAAGUCCCGCAGAGUGAU | |
| | GAGACAGCGACUAGCCAUGGCAGUGCUCAGGUGCCCGAG | |
| | CCACCCACCAUCCAUCUCGCCGCACAGGGCAUGGCCUACC | |
| | CACUGCACGAGCAGCACGGCAUGGCGCCCUGCCCCGUGGC | |
| | CCAGGCUCCUCCAACCCCGCUUCCUCCAGUAUCCCCUGGU | |
| | GACCAGUUGCCAGGCGUGUUCAGCGACGGUAGGGUGGCC | |
| | UGCGCGCCAGUUCCUGCACCAGCAGGCCCAAUUGUGAGG | |
| | CCCUGGGAGCCCUCCCUAACCCAGGCGGCAGGUCAGGCCU | |
| | UCGCUCCAGUUAGACCACAGCACAUGCCCGUGGAACCGG | |
| | UGCCAGUGCCUACGGUGGCGCUGGAGAGGCCCGUGUACC | |
| | CAAAGCCUGUGCGACCUGCGCCUCCUAAGAUCGCCAUGCA | |
| | AGGCCCGGGCGAGACUAGCGGUAUCAGGCGGGCCAGGGA | |
| | GAGGUGGCGCCCGGCACCGUGGACUCCCAACCCACCAAGG | |
| | UCACCUAGUCAGAUGAGCGUGCGUGAUAGGCUGGCACGG | |
| | CUUCGGGCAGAGGCUCAGGUAAAGCAGGCCAGUGUGGAG | |
| | GUGCAGCCACCACAGCUGACUCAGGUGUCCCCGCAGCAGC | |
| | CCAUGGAGGGCCCACUGGUGCCGGAACAGCAGAUGUUCC | |
| | CCGGCGCCCCGUUCAGCCAGGUGGCCGACGUGGUUAGGG | |
| | CUCCUGGCGUGCCUGCUAUGCAGCCUCAGUACUUCGACCU | |
| | ACCGCUGAUCCAGCCCAUCAGUCAAGGUGCCCCAGUGGCC | |
| | CCACUGAGGGCUAGCAUGGGCCCGGUCCCUCCUGUUCCAG | |
| | CCACCCAGCCUCAAUAUUUCGACAUUCCUCUGACCGAGCC | |
| | UAUAAACCAGGGCGCGUCUGCGGCCCACUUCCUGCCUCAA | |
| | CAGCCAAUGGAAGGCCCGCUGGUCCCAGAACAGUGGAUG | |
| | UUCCCUGGAGCUGCCCUGAGCCAAUCAGUGAGGCCGGGA | |
| | GUUGCCCAGAGCCAGUAUUUCGAUCUCCCUUUGACACAG | |
| | CCUAUCAAUCACGGAGCACCUGCCGCUCACUUCCUUCACC | |
| | AGCCUCCGAUGGAAGGUCCUUGGGUUCCAGAGCAAUGGA | |
| | UGUUCCAAGGUGCGCCACCAUCUCAGGGCACAGACGUGG | |
| | UCCAGCAUCAGCUGGACGCGCUUGGCUACACUCUACACG | |
| | GCCUGAACCACCCGGGCGUUCCAGUGAGUCCAGCCGUGA | |
| | ACCAGUACCAUCUCUCUCAGGCUGCCUUCGGCCUGCCCAU | |
| | UGACGAGGACGAGAGCGGCGAGGGCAGCGAUACCAGCGA | |
| | GCCCUGCGAAGCCCUGGAUCUUUCCAUCCACGGCCGACCU | |
| | UGCCCACAGGCUCCAGAGUGGCCCGUACAGGAAGAAGGC | |
| | GGCCAGGACGCCACCGAGGUCCUGGACUUGUCCAUACAU | |
| | GGCAGACCGCGCCCUAGGACCCCGGAGUGGCCAGUUCAG | |
| | GGUGAAGGUGGUCAGAACGUGACCGGCCCGGAAACCCGA | |
| | AGGGUGGUCGUGUCCGCUGUUGUCCACAUGUGUCAGGAU | |
| | GACGAAUUCCCAGAUCUGCAAGAUCCACCCGACGAGGCC | |
| 3′ UTR | UGAUAAUAGGCUGGAGCCUCGGUGGCCAUGCUUCUUGCC | 3 |
| | CCUUGGGCCUCCCCCCAGCCCCUCCUCCCCUUCCUGCACC | |
| | CGUACCCCCGUGGUCUUUGAAUAAAGUCUGAGUGGGCGG | |
| | C | |
| Corresponding | MDKDRPGPPALDDNMEEEVPSTSVVQEQVSAGDWENVLIELS | 43 |
| amino acid | DSSSEKEAEDAHLEPAQKGTKRKRVDHDAGGSAPARPMLPPQ | |
| sequence | PDLPGREAILRRFPLDLRTLLQAIGAAATRIDTRAIDQFFGSQIS | |
| | NTEMYIMYAMAIRQAIRDRRRNPASRRDQAKWRLQTLAAGW | |
| | PMGYQAYSSWMYSYTDHQTTPTFVHLQATLGCTGGRRCHVT | |
| | FSAGTFKLPRCTPGDRQWLYVQSSVGNIVQSCNPRYSIFFDYM | |
| | AIHRSLTKIWEEVLTPDQRVSFMEFLGFLQRTDLSYIKSFVSDA | |
| | LGTTSIQTPWIDDNPSTETAQAWNAGFLRGRAYGIDLLRTEGE | |
| | HVEGATGETREESEDTESDGDDEDLPCIVSRGGPKVKRPPIFIR | |
| | RLHRLLLMRAGKRTEQGKEVLEKARGSTYGTPRPPVPKPRPE | |
| | VPQSDETATSHGSAQVPEPPTIHLAAQGMAYPLHEQHGMAPC | |
| | PVAQAPPTPLPPVSPGDQLPGVFSDGRVACAPVPAPAGPIVRP | |
| | WEPSLTQAAGQAFAPVRPQHMPVEPVPVPTVALERPVYPKPV | |
| | RPAPPKIAMQGPGETSGIRRARERWRPAPWTPNPPRSPSQMSV | |
| | RDRLARLRAEAQVKQASVEVQPPQLTQVSPQQPMEGPLVPEQ | |
| | QMFPGAPFSQVADVVRAPGVPAMQPQYFDLPLIQPISQGAPV | |
| | APLRASMGPVPPVPATQPQYFDIPLTEPINQGASAAHFLPQQP | |
| | MEGPLVPEQWMFPGAALSQSVRPGVAQSQYFDLPLTQPINHG | |
| | APAAHFLHQPPMEGPWVPEQWMFQGAPPSQGTDVVQHQLD | |
| | ALGYTLHGLNHPGVPVSPAVNQYHLSQAAFGLPIDEDESGEG | |
| | SDTSEPCEALDLSIHGRPCPQAPEWPVQEEGGQDATEVLDLSI | |
| | HGRPRPRTPEWPVQGEGGQNVTGPETRRVVVSAVVHMCQDD | |
| | EFPDLQDPPDEA | |
| PolyA tail | 100 nt | |

EBNA1_trunc_001 (modified)

| SEQ ID NO: 178 consists of from 5′ end to 3′ end: | | 178 |
|---|---|---|
| 5′ UTR SEQ ID NO: 1, mRNA ORF SEQ ID NO: 73, and | | |
| 3′ UTR SEQ ID NO: 3 | | |
| Chemistry | 1-methylpseudouridine | |
| Cap | 7mG(5′)ppp(5′)NlmpNp | |
| 5′ UTR | GGGAAAUAAGAGAGAAAAGAAGAGUAAGAAGAAAUAUA | 1 |
| | AGAGCCACC | |
| ORF of mRNA | AUGGGCAGAAGACCCUUCUUUCACCCCGUGGGAGAAGCC | 73 |
| Construct | GACUAUUUCGAGUACCACCAGGAGGGCGGUCCUGACGGC | |
| (excluding | GAGCCCGACGUGCCUCCAGGCGCCAUCGAACAGGGCCCCG | |
| the stop | CUGACGAUCCUGGCGAGGGGCCUUCCACAGGCCCUCGCGG | |
| codon) | CCAGGGAGAUGGCGGAAGGCGGAAGAAGGGCGGCUGGUU | |
| | UGGCAAGCAUAGGGGCCAGGGCGGCUCCAAUCCCAAGUU | |
| | CGAGAAUAUCGCCGAGGGGCUCCGGGCUCUGCUGGCCCG | |
| | GUCGCACGUCGAACGUACCACUGACGAGGGGACGUGGGU | |
| | GGCCGGCGUCUUUGUGUACGGAGGAUCCAAGACCUCCCU | |
| | GUACAACCUGAGAAGGGGCACCGCCCUUGCCAUCCCUCAG | |
| | UGCAGACUCACGCCCCUGAGCAGGCUCCCCUUUGGGAUG | |
| | GCUCCUGGGCCAGGCCCGCAGCCCGGGCCCCUCAGGGAAA | |
| | GCAUCGUGUGUUACUUUAUGGUGUUUCUGCAGACACACA | |
| | UCUUUGCAGAAGUUCUGAAAGAUGCAAUCAAGGAUCUGG | |
| | UGAUGACCAAGCCUGCACCUACGUGCAAUAUCAGGGUGA | |
| | CAGUAUGCUCCUUCGACGACGGUGUGGACCUCCCGCCCUG | |
| | GUUCCCACCCAUGGUCGAGGGUGCCGCCGCCGAGGGAGA | |
| | CGAUGGCGACGACGGUGAUGAGGGUGGAGACGGAGAUGA | |
| | AGGCGAGGAGGGGCAGGAG | |
| 3′ UTR | UGAUAAUAGGCUGGAGCCUCGGUGGCCAUGCUUCUUGCC | 3 |
| | CCUUGGGCCUCCCCCCAGCCCCUCCUCCCCUUCCUGCACC | |
| | CGUACCCCCGUGGUCUUUGAAUAAAGUCUGAGUGGGCGG | |
| | C | |
| Corresponding | MGRRPFFHPVGEADYFEYHQEGGPDGEPDVPPGAIEQGPADD | 10 |
| amino acid | PGEGPSTGPRGQGDGGRRKKGGWFGKHRGQGGSNPKFENIA | |
| sequence | EGLRALLARSHVERTTDEGTWVAGVFVYGGSKTSLYNLRRG | |
| | TALAIPQCRLTPLSRLPFGMAPGPGPQPGPLRESIVCYFMVFLQ | |
| | THIFAEVLKDAIKDLVMTKPAPTCNIRVTVCSFDDGVDLPPWF | |
| | PPMVEGAAAEGDDGDDGDEGGDGDEGEEGQE | |
| PolyA tail | 100 nt | |

EBV LMP1_DX_(modified)_DX

| SEQ ID NO: 179 consists of from 5′ end to 3′ end: | | 179 |
|---|---|---|
| 5′ UTR SEQ ID NO: 1, mRNA ORF SEQ ID NO: 74, and | | |
| 3′ UTR SEQ ID NO: 3 | | |
| Chemistry | 1-methylpseudouridine | |
| Cap | 7mG(5′)ppp(5′)NlmpNp | |
| 5′ UTR | GGGAAAUAAGAGAGAAAAGAAGAGUAAGAAGAAAUAUA | 1 |
| | AGAGCCACC | |
| ORF of mRNA | AUGGAACACGACCUUGAGAGGGGCCCACCGGGCCCGCGA | 74 |
| Construct | CGGCCACCUCGAGGACCUCCCCUCUCCUCUUCCCUAGGCC | |
| (excluding | UUGCUCUCCUUCUCCUCCUCUUGGCGCUACUGUUUUGGC | |
| the stop | UGUACAUCGUUAUGAGUGACUGGACUGGAGGAGCCCUCC | |
| codon) | UUGUCCUCUAUUCCUUUGCUCUCAUGCUUAUAAUUAUAA | |
| | UUUUGAUCAUCUUUAUCUUCAGAAGAGACCUUCUCUGUC | |
| | CACUUGGAGCCCUUUGUAUACUCCUACUGAUGAUCACCC | |
| | UCCUGCUCAUCGCUCUCUGGAAUUUGCACGGACAGGCAU | |
| | UGUUCCUUGGAAUUGUGCUGUUCAUCUUCGGGUGCUUAC | |
| | UUGUCUUAGGUAUCUGGAUCUACUUAUUGGAGAUGCUCU | |
| | GGCGACUUGGUGCCACCAUCUGGCAGCUUUUGGCCUUCU | |
| | UCCUAGCCUUCUUCCUAGACCUCAUCCUGCUCAUUAUUGC | |
| | UCUCUAUCUACAACAGAACUGGUGGACUCUAUUGGUUGA | |
| | UCUCCUUUGGCUCCUCCUGUUUCUGGCGAUUUUAAUCUG | |
| | GAUGUAUUACCAUGGACAACGACACAGUGAUGAACACCA | |
| | CCACGAUGACUCCCUCCCGCACCCUCAACAAGCUACCGAU | |
| | GAUUCUGGCCAUGAAUCUGACUCUAACUCCAACGAGGGC | |
| | AGACACCACCUGCUCGUGAGUGGAGCCGGCGACGGACCA | |
| | CCACUCUGCUCUCAGAACCUAGGCGCACCUGGAGGUGGU | |
| | CCUGACAAUGGCCCACAGGACCCUGACAACACGGAUGAU | |
| | AAUGGCCCACAGGACCCUGAUAACACUGAUGACAAUGGC | |
| | CCACAUGACCCGCUGCCUCAAGACCCAGACAAUACUGAUG | |
| | ACAAUGGCCCACAGGACCCUGACAACACUGAUGACAAUG | |
| | GCCCGCACGACCCGUUACCUCAUAGCCCUAGCGACUCUGC | |
| | UGGAAAUGAUGGAGGCCCUCCACAAUUGACGGAAGAGGU | |
| | UGAGAACAAAGGAGGUGACCAGGGCCCGCCUUUGAUGAC | |
| | AGACGGAGGCGGCGGUCAUAGUCAUGAUUCCGGCCAUGG | |
| | CGGCGGUGAUCCACACCUUCCUACGCUGCUGUUGGGUUC | |
| | UUCUGGUUCCGGUGGAGAUGAUGACGACCCGCACGGCCC | |
| | AGUUCAGCUAAGCUACUAUGAC | |
| 3′ UTR | UGAUAAUAGGCUGGAGCCUCGGUGGCCAUGCUUCUUGCC | 3 |
| | CCUUGGGCCUCCCCCCAGCCCCUCCUCCCCUUCCUGCACC | |
| | CGUACCCCCGUGGUCUUUGAAUAAAGUCUGAGUGGGCGG | |
| | C | |
| Corresponding | MEHDLERGPPGPRRPPRGPPLSSSLGLALLLLLLALLFWLYIV | 16 |
| amino acid | MSDWTGGALLVLYSFALMLIIIILIIFIFRRDLLCPLGALCILLLM | |
| sequence | ITLLLIALWNLHGQALFLGIVLFIFGCLLVLGIWIYLLEMLWRL | |
| | GATIWQLLAFFLAFFLDLILLIIALYLQQNWWTLLVDLLWLLL | |
| | FLAILIWMYYHGQRHSDEHHHDDSLPHPQQATDDSGHESDSN | |
| | SNEGRHHLLVSGAGDGPPLCSQNLGAPGGGPDNGPQDPDNTD | |
| | DNGPQDPDNTDDNGPHDPLPQDPDNTDDNGPQDPDNTDDNG | |
| | PHDPLPHSPSDSAGNDGGPPQLTEEVENKGGDQGPPLMTDGG | |
| | GGHSHDSGHGGGDPHLPTLLLGSSGSGGDDDDPHGPVQLSYY | |
| | D | |
| PolyA tail | 100 nt | |

EBV LMP2

| SEQ ID NO: 180 consists of from 5′ end to 3′ end: | | 180 |
|---|---|---|
| 5′ UTR SEQ ID NO: 1, mRNA ORF SEQ ID NO: 75, and | | |
| 3′ UTR SEQ ID NO: 3 | | |
| Chemistry | 1-methylpseudouridine | |
| Cap | 7mG(5′)ppp(5′)NlmpNp | |
| 5′ UTR | GGGAAAUAAGAGAGAAAAGAAGAGUAAGAAGAAAUAUA | 1 |
| | AGAGCCACC | |
| ORF of mRNA | AUGGGGUCCCUAGAAAUGGUGCCAAUGGGCGCGGGUCCU | 75 |
| Construct | CCUAGCCCCGGCGGGGAUCCGGAUGGGUACGAUGGCGGA | |
| (excluding | AACAACUCCCAAUAUCCAUCUGCUUCUGGCUCUUCUGGG | |
| the stop | AACACGCCCACCCCACCGAACGAUGAGGAACGUGAAUCU | |
| codon) | AAUGAAGAGCCACCACCGCCUUAUGAGGACCCAUAUUGG | |
| | GGCAAUGGCGACCGUCACUCGGACUAUCAACCACUAGGA | |
| | ACCCAAGAUCAAAGUCUGUACUUGGGAUUGCAACACGAC | |
| | GGGAAUGACGGGCUCCCUCCACCUCCCUACUCUCCACGGG | |
| | AUGACUCAUCUCAACACAUAUACGAAGAAGCGGGCAGAG | |
| | GAAGUAUGAAUCCAGUAUGCCUGCCUGUAAUUGUUGCGC | |
| | CCUACCUCUUUUGGCUGGCGGCUAUUGCCGCCUCGUGUU | |
| | UCACGGCCUCAGUUAGUACCGUUGUGACCGCCACCGGCU | |
| | UGGCCCUCUCACUUCUACUCUUGGCAGCAGUGGCCAGCUC | |
| | AUAUGCCGCUGCACAAAGGAAACUGCUGACACCGGUGAC | |
| | AGUGCUUACUGCGGUUGUCACUUUCUUUGCAAUUUGCCU | |
| | AACAUGGAGGAUUGAGGACCCACCUUUUAAUUCUCUUCU | |
| | GUUUGCAUUGCUGGCCGCAGCUGGCGGACUACAAGGCAU | |
| | UUACGUUCUGGUGAUGCUUGUGCUCCUGAUACUAGCGUA | |
| | CAGAAGGAGAUGGCGCCGUUUGACUGUUUGUGGCGGCAU | |
| | CAUGUUCUUGGCAUGUGUACUUGUCCUCAUCGUCGACGC | |
| | UGUUUUGCAGCUGAGUCCCCUCCUUGGAGCUGUAACUGU | |
| | GGUUUCCAUGACGCUGCUGCUACUGGCUUUCGUCCUCUG | |
| | GCUCUCUUCGCCAGGUGGCCUAGGUACUCUUGGUGCAGC | |
| | CCUUUUAACAUUGGCAGCAGCUCUGGCACUGCUAGCGUC | |
| | ACUGAUUUUGGGCACACUUAACUUGACUACAAUGUUCCU | |
| | UCUCAUGCUCCUAUGGACACUUGUGGUUCUCCUGAUUUG | |
| | CUCUUCGUGCUCUUCAUGUCCACUGAGCAAGAUCCUUCU | |
| | GGCACGACUGUUCCUAUAUGCUCUCGCACUCUUGUUGCU | |
| | AGCCUCCGCGCUAAUCGCUGGUGGCAGUAUUUUGCAAAC | |
| | AAACUUCAAGAGUUUAAGCAGCACUGAAUUUAUACCCAA | |
| | UUUGUUCUGCAUGUUAUUACUGAUUGUCGCUGGCAUACU | |
| | CUUCAUUCUUGCUAUCCUGACCGAAUGGGGCAGUGGAAA | |
| | UAGAACAUACGGUCCAGUCUUUAUGUGCCUCGGUGGCCU | |
| | GCUCACCAUGGUAGCCGGCGCUGUGUGGCUGACGGUGAU | |
| | GUCUAACACGCUUUUGUCUGCCUGGAUUCUUACAGCAGG | |
| | AUUCCUGAUUUUCCUCAUUGGCUUUGCCCUCUUUGGGGU | |
| | CAUUAGAUGCUGCCGCUACUGCUGCUACUACUGCCUUAC | |
| | ACUGGAAAGUGAGGAGCGCCCACCGACCCCAUAUCGCAA | |
| | CACUGUA | |
| 3′ UTR | UGAUAAUAGGCUGGAGCCUCGGUGGCCAUGCUUCUUGCC | 3 |
| | CCUUGGGCCUCCCCCCAGCCCCUCCUCCCCUUCCUGCACC | |
| | CGUACCCCCGUGGUCUUUGAAUAAAGUCUGAGUGGGCGG | |
| | C | |
| Corresponding | MGSLEMVPMGAGPPSPGGDPDGYDGGNNSQYPSASGSSGNT | 22 |
| amino acid | PTPPNDEERESNEEPPPPYEDPYWGNGDRHSDYQPLGTQDQSL | |
| sequence | YLGLQHDGNDGLPPPPYSPRDDSSQHIYEEAGRGSMNPVCLP | |
| | VIVAPYLFWLAAIAASCFTASVSTVVTATGLALSLLLLAAVAS | |
| | SYAAAQRKLLTPVTVLTAVVTFFAICLTWRIEDPPFNSLLFALL | |
| | AAAGGLQGIYVLVMLVLLILAYRRRWRRLTVCGGIMFLACVL | |
| | VLIVDAVLQLSPLLGAVTVVSMTLLLLAFVLWLSSPGGLGTL | |
| | GAALLTLAAALALLASLILGTLNLTTMFLLMLLWTLVVLLICS | |
| | SCSSCPLSKILLARLFLYALALLLLASALIAGGSILQTNFKSLSS | |
| | TEFIPNLFCMLLLIVAGILFILAILTEWGSGNRTYGPVFMCLGG | |
| | LLTMVAGAVWLTVMSNTLLSAWILTAGFLIFLIGFALFGVIRC | |
| | CRYCCYYCLTLESEERPPTPYRNTV | |
| PolyA tail | 100 nt | |

EBV LMP2

| SEQ ID NO: 181 consists of from 5′ end to 3′ end: | | 181 |
|---|---|---|
| 5′ UTR SEQ ID NO: 1, mRNA ORF SEQ ID NO: 76, and | | |
| 3′ UTR SEQ ID NO: 3 | | |
| Chemistry | 1-methylpseudouridine | |
| Cap | 7mG(5′)ppp(5′)NlmpNp | |
| 5′ UTR | GGGAAAUAAGAGAGAAAAGAAGAGUAAGAAGAAAUAUA | 1 |
| | AGAGCCACC | |
| ORF of mRNA | AUGGGGUCCCUAGAAAUGGUGCCAAUGGGCGCGGGUCCU | 76 |
| Construct | CCUAGCCCCGGCGGGGAUCCGGAUGGGUACGAUGGCGGA | |
| (excluding | AACAACUCCCAAUAUCCAUCUGCUUCUGGCUCUUCUGGG | |
| the stop | AACACGCCCACCCCACCGAACGAUGAGGAACGUGAAUCU | |
| codon) | AAUGAAGAGCCACCACCGCCUUAUGAGGACCCAUAUUGG | |
| | GGCAAUGGCGACCGUCACUCGGACUAUCAACCACUAGGA | |
| | ACCCAAGAUCAAAGUCUGUACUUGGGAUUGCAACACGAC | |
| | GGGAAUGACGGGCUCCCUCCACCUCCCUACUCUCCACGGG | |
| | AUGACUCAUCUCAACACAUAUACGAAGAAGCGGGCAGAG | |
| | GAAGUAUGAAUCCAGUAUGCCUGCCUGUAAUUGUUGCGC | |
| | CCUACCUCUUUUGGCUGGCGGCUAUUGCCGCCUCGUGUU | |
| | UCACGGCCUCAGUUAGUACCGUUGUGACCGCCACCGGCU | |
| | UGGCCCUCUCACUUCUACUCUUGGCAGCAGUGGCCAGCUC | |
| | AUAUGCCGCUGCACAAAGGAAACUGCUGACACCGGUGAC | |
| | AGUGCUUACUGCGGUUGUCACUUUCUUUGCAAUUUGCCU | |
| | AACAUGGAGGAUUGAGGACCCACCUUUUAAUUCUCUUCU | |
| | GUUUGCAUUGCUGGCCGCAGCUGGCGGACUACAAGGCAU | |
| | UUACGUUCUGGUGAUGCUUGUGCUCCUGAUACUAGCGUA | |
| | CAGAAGGAGAUGGCGCCGUUUGACUGUUUGUGGCGGCAU | |
| | CAUGUUCUUGGCAUGUGUACUUGUCCUCAUCGUCGACGC | |
| | UGUUUUGCAGCUGAGUCCCCUCCUUGGAGCUGUAACUGU | |
| | GGUUUCCAUGACGCUGCUGCUACUGGCUUUCGUCCUCUG | |
| | GCUCUCUUCGCCAGGUGGCCUAGGUACUCUUGGUGCAGC | |
| | CCUUUUAACAUUGGCAGCAGCUCUGGCACUGCUAGCGUC | |
| | ACUGAUUUUGGGCACACUUAACUUGACUACAAUGUUCCU | |
| | UCUCAUGCUCCUAUGGACACUUGUGGUUCUCCUGAUUUG | |
| | CUCUUCGUGCUCUUCAUGUCCACUGAGCAAGAUCCUUCU | |
| | GGCACGACUGUUCCUAUAUGCUCUCGCACUCUUGUUGCU | |
| | AGCCUCCGCGCUAAUCGCUGGUGGCAGUAUUUUGCAAAC | |
| | AAACUUCAAGAGUUUAAGCAGCACUGAAUUUAUACCCAA | |
| | UUUGUUCUGCAUGUUAUUACUGAUUGUCGCUGGCAUACU | |
| | CUUCAUUCUUGCUAUCCUGACCGAAUGGGGCAGUGGAAA | |
| | UAGAACAUACGGUCCAGUCUUUAUGUGCCUCGGUGGCCU | |
| | GCUCACCAUGGUAGCCGGCGCUGUGUGGCUGACGGUGAU | |
| | GUCUAACACGCUUUUGUCUGCCUGGAUUCUUACAGCAGG | |
| | AUUCCUGAUUUUCCUCAUUGGCUUUGCCCUCUUUGGGGU | |
| | CAUUAGAUGCUGCCGCUACUGCUGCUACUACUGCCUUAC | |
| | ACUGGAAAGUGAGGAGCGCCCACCGACCCCAUAUCGCAA | |
| | CACUGUA | |
| 3′ UTR | UGAUAAUAGGCUGGAGCCUCGGUGGCCAUGCUUCUUGCC | 3 |
| | CCUUGGGCCUCCCCCCAGCCCCUCCUCCCCUUCCUGCACC | |
| | CGUACCCCCGUGGUCUUUGAAUAAAGUCUGAGUGGGCGG | |
| | C | |
| Corresponding | MGSLEMVPMGAGPPSPGGDPDGYDGGNNSQYPSASGSSGNT | 22 |
| amino acid | PTPPNDEERESNEEPPPPYEDPYWGNGDRHSDYQPLGTQDQSL | |
| sequence | YLGLQHDGNDGLPPPPYSPRDDSSQHIYEEAGRGSMNPVCLP | |
| | VIVAPYLFWLAAIAASCFTASVSTVVTATGLALSLLLLAAVAS | |
| | SYAAAQRKLLTPVTVLTAVVTFFAICLTWRIEDPPFNSLLFALL | |
| | AAAGGLQGIYVLVMLVLLILAYRRRWRRLTVCGGIMFLACVL | |
| | VLIVDAVLQLSPLLGAVTVVSMTLLLLAFVLWLSSPGGLGTL | |
| | GAALLTLAAALALLASLILGTLNLTTMFLLMLLWTLVVLLICS | |
| | SCSSCPLSKILLARLFLYALALLLLASALIAGGSILQTNFKSLSS | |
| | TEFIPNLFCMLLLIVAGILFILAILTEWGSGNRTYGPVFMCLGG | |
| | LLTMVAGAVWLTVMSNTLLSAWILTAGFLIFLIGFALFGVIRC | |
| | CRYCCYYCLTLESEERPPTPYRNTV | |
| PolyA tail | 100 nt | |

EBV gp350_003 (modified)

| SEQ ID NO: 182 consists of from 5′ end to 3′ end: | | 182 |
|---|---|---|
| 5′ UTR SEQ ID NO: 1, mRNA ORF SEQ ID NO: 77, and | | |
| 3′ UTR SEQ ID NO: 3 | | |
| Chemistry | 1-methylpseudouridine | |
| Cap | 7mG(5′)ppp(5′)NlmpNp | |
| 5′ UTR | GGGAAAUAAGAGAGAAAAGAAGAGUAAGAAGAAAUAUA | 1 |
| | AGAGCCACC | |
| ORF of mRNA | AUGGAAGCCGCUCUUCUGGUCUGCCAGUAUACAAUCCAG | 77 |
| Construct | UCGCUGAUUCAUCUCACCGGCGAGGAUCCAGGUUUCUUU | |
| (excluding | AACGUGGAGAUUCCAGAAUUCCCUUUCUAUCCAACUUGU | |
| the stop | AACGUGUGUACUGCCGACGUUAACGUUACUAUUAACUUU | |
| codon) | GACGUGGGCGGAAAGAAGCACCAGCUGGAUCUUGAUUUC | |
| | GGCCAGCUAACACCUCAUACCAAGGCCGUCUACCAACCAC | |
| | GCGGGGCAUUUGGCGGUUCUGAGAAUGCUACAAACCUGU | |
| | UCCUUUUGGAACUCCUCGGAGCAGGGGAACUGGCACUUA | |
| | CAAUGAGGAGUAAGAAGCUGCCCAUCAACGUCACCACGG | |
| | GUGAAGAACAGCAGGUGUCCCUGGAGUCCGUUGAUGUGU | |
| | AUUUCCAGGACGUUUUCGGGACAAUGUGGUGUCAUCAUG | |
| | CCGAAAUGCAGAAUCCGGUGUAUCUCAUUCCUGAGACCG | |
| | UGCCCUAUAUUAAAUGGGAUAACUGUAAUUCGACAAACA | |
| | UAACUGCCGUAGUGCGUGCCCAGGGUCUGGAUGUAACUU | |
| | UGCCUCUCUCCCUUCCCACUUCUGCCCAGGACUCCAAUUU | |
| | CUCAGUGAAGACCGAAAUGCUUGGGAACGAGAUCGACAU | |
| | CGAGUGUAUCAUGGAGGAUGGGGAGAUCAGUCAGGUGUU | |
| | GCCUGGUGACAAUAAGUUUAAUAUAACAUGUUCCGGCUA | |
| | UGAAUCACAUGUUCCAAGCGGAGGUAUUCUCACAAGUAC | |
| | AUCUCCCGUAGCCACGCCGAUUCCGGGAACCGGAUACGCC | |
| | UAUUCACUUCGGCUGACUCCUCGGCCAGUGUCACGAUUC | |
| | CUGGGCAAUAACUCAAUUCUGUACGUCUUUUACAGCGGC | |
| | AACGGCCCAAAGGCCAGUGGAGGCGAUUACUGUAUCCAG | |
| | UCUAACAUCGUAUUUUCAGAUGAGAUUCCAGCAAGCCAA | |
| | GACAUGCCAACUAAUACUACAGACAUUACAUACGUCGGU | |
| | GAUAACGCCACUUAUUCAGUCCCUAUGGUCACAUCCGAG | |
| | GACGCGAACUCACCCAAUGUUACCGUUACCGCAUUCUGG | |
| | GCAUGGCCCAAUAAUACGGAAACAGACUUCAAAUGUAAG | |
| | UGGACCCUGACCAGUGGCACCCCUUCUGGCUGCGAGAAU | |
| | AUAAGCGGGGCAUUUGCUAGCAACAGAACAUUCGAUAUU | |
| | ACUGUGUCUGGCCUGGGGACCGCGCCCAAGACACUCAUU | |
| | AUAACGCGAACAGCUACGAACGCUACCACAACCACACAU | |
| | AAAGUGAUUUUCAGCAAGGCUCCAGAAUCAACUACAACC | |
| | AGUCCGACCCUUAAUACCACAGGCUUCGCAGACCCGAACA | |
| | CAACGACGGGACUGCCCUCCUCAACGCAUGUGCCGACUAA | |
| | UCUGACUGCUCCCGCAAGUACCGGCCCAACAGUCUCCACA | |
| | GCAGACGUCACCUCUCCGACUCCCGCCGGCACUACAUCUG | |
| | GAGCCUCACCGGUGACUCCUAGUCCUUCGCCCUGGGACAA | |
| | UGGGACCGAGUCUAAAGCCCCGGACAUGACGAGUUCUAC | |
| | CUCACCAGUUACAACCCCAACACCUAAUGCCACAAGCCCU | |
| | ACGCCAGCCGUGACCACCCCUACGCCCAAUGCCACCAGCC | |
| | CAACACCCGCUGUUACAACGCCAACGCCCAACGCUACUUC | |
| | UCCAACGCUAGGAAAGACAUCACCCACCUCAGCUGUAACC | |
| | ACGCCCACACCAAACGCUACCGGGCCAACCGUUGGCGAAA | |
| | CCUCGCCCCAGGCCAAUGCGACAAACCACACCCUUGGCGG | |
| | GACUUCUCCCACUCCUGUGGUGACUUCACAACCGAAGAA | |
| | CGCGACGUCGGCCGUUACGACCGGGCAGCACAAUAUCACC | |
| | UCGUCCUCCACGUCGUCCAUGUCCUUGCGGCCUUCCAGUA | |
| | ACCCAGAGACACUGUCUCCUAGUACCAGUGACAACAGCA | |
| | CCUCUCACAUGCCAUUACUGACUUCCGCCCACCCAACCGG | |
| | CGGAGAGAACAUCACUCAGGUGACGCCCGCAUCUAUUUC | |
| | UACCCACCACGUGAGCACUAGCAGCCCGGCACCAAGACCA | |
| | GGGACCACCUCCCAGGCUAGCGGCCCGGGCAACUCCUCCA | |
| | CUAGCACGAAACCAGGAGAGGUGAACGUGACCAAGGGCA | |
| | CACCGCCACAGAAUGCAACUUCCCCACAGGCGCCCUCCGG | |
| | CCAGAAGACUGCUGUACCUACGGUCACUAGCACUGGCGG | |
| | AAAGGCGAAUUCAACCACCGGUGGUAAGCAUACCACCGG | |
| | ACACGGCGCUCGGACUAGCACAGAGCCAACCACUGAUUA | |
| | CGGAGGUGACUCAACGACCCCGAGGCCCAGGUACAACGC | |
| | AACCACCUAUCUCCCACCAUCCACAUCUUCCAAGCUCAGG | |
| | CCUCGUUGGACUUUCACCUCCCCGCCUGUGACUACAGCGC | |
| | AGGCCACAGUGCCAGUGCCUCCAACGUCACAGCCGCGGUU | |
| | UAGCAAUCUCUCCAUGCUGGUCCUGCAGUGGGCAUCUCU | |
| | GGCAGUCCUGACACUGCUUCUUUUGCUCGUGAUGGCCGA | |
| | UUGUGCGUUUAGACGCAACCUUUCAACAUCCCACACAUA | |
| | UACAACUCCACCCUAUGAUGACGCAGAGACUUAUGUG | |
| 3′ UTR | UGAUAAUAGGCUGGAGCCUCGGUGGCCAUGCUUCUUGCC | 3 |
| | CCUUGGGCCUCCCCCCAGCCCCUCCUCCCCUUCCUGCACC | |
| | CGUACCCCCGUGGUCUUUGAAUAAAGUCUGAGUGGGCGG | |
| | C | |
| Corresponding | MEAALLVCQYTIQSLIHLTGEDPGFFNVEIPEFPFYPTCNVCTA | 78 |
| amino acid | DVNVTINFDVGGKKHQLDLDFGQLTPHTKAVYQPRGAFGGS | |
| sequence | ENATNLFLLELLGAGELALTMRSKKLPINVTTGEEQQVSLESV | |
| | DVYFQDVFGTMWCHHAEMQNPVYLIPETVPYIKWDNCNSTN | |
| | ITAVVRAQGLDVTLPLSLPTSAQDSNFSVKTEMLGNEIDIECIM | |
| | EDGEISQVLPGDNKFNITCSGYESHVPSGGILTSTSPVATPIPGT | |
| | GYAYSLRLTPRPVSRFLGNNSILYVFYSGNGPKASGGDYCIQS | |
| | NIVFSDEIPASQDMPTNTTDITYVGDNATYSVPMVTSEDANSP | |
| | NVTVTAFWAWPNNTETDFKCKWTLTSGTPSGCENISGAFASN | |
| | RTFDITVSGLGTAPKTLIITRTATNATTTTHKVIFSKAPESTTTS | |
| | PTLNTTGFADPNTTTGLPSSTHVPTNLTAPASTGPTVSTADVTS | |
| | PTPAGTTSGASPVTPSPSPWDNGTESKAPDMTSSTSPVTTPTPN | |
| | ATSPTPAVTTPTPNATSPTPAVTTPTPNATSPTLGKTSPTSAVT | |
| | TPTPNATGPTVGETSPQANATNHTLGGTSPTPVVTSQPKNATS | |
| | AVTTGQHNITSSSTSSMSLRPSSNPETLSPSTSDNSTSHMPLLTS | |
| | AHPTGGENITQVTPASISTHHVSTSSPAPRPGTTSQASGPGNSS | |
| | TSTKPGEVNVTKGTPPQNATSPQAPSGQKTAVPTVTSTGGKA | |
| | NSTTGGKHTTGHGARTSTEPTTDYGGDSTTPRPRYNATTYLPP | |
| | STSSKLRPRWTFTSPPVTTAQATVPVPPTSQPRFSNLSMLVLQ | |
| | WASLAVLTLLLLLVMADCAFRRNLSTSHTYTTPPYDDAETYV | |
| PolyA tail | 100 nt | |

EBV gH (BXLF2)_RX

| SEQ ID NO: 183 consists of from 5′ end to 3′ end: | | 183 |
|---|---|---|
| 5′ UTR SEQ ID NO: 1, mRNA ORF SEQ ID NO: 79, and | | |
| 3′ UTR SEQ ID NO: 3 | | |
| Chemistry | 1-methylpseudouridine | |
| Cap | 7mG(5′)ppp(5′)NlmpNp | |
| 5′UTR | GGGAAAUAAGAGAGAAAAGAAGAGUAAGAAGAAAUAUA | 1 |
| | AGAGCCACC | |
| ORF of mRNA | AUGCAGUUGUUGUGCGUGUUCUGCCUCGUGUUACUCUGG | 79 |
| Construct | GAGGUGGGCGCCGCCAGCCUUAGCGAGGUGAAGCUCCAC | |
| (excluding | UUGGACAUCGAGGGCCACGCCAGCCACUACACCAUCCCCU | |
| the stop | GGACCGAGCUCAUGGCCAAGGUGCCCGGCCUUAGCCCCGA | |
| codon) | GGCCCUGUGGCGGGAGGCCAACGUGACCGAGGACCUGGC | |
| | CAGCAUGCUGAACCGGUACAAGCUGAUCUACAAGACCAG | |
| | CGGCACCCUGGGCAUCGCCCUGGCCGAGCCCGUGGACAUC | |
| | CCCGCCGUUAGCGAAGGCAGCAUGCAGGUGGACGCCAGC | |
| | AAGGUGCACCCCGGCGUGAUCAGCGGCCUGAACAGCCCCG | |
| | CCUGUAUGUUGAGCGCCCCACUGGAGAAGCAGCUGUUCU | |
| | ACUACAUCGGCACCAUGCUGCCCAACACCCGGCCCCACAG | |
| | CUACGUGUUCUACCAGCUGCGGUGCCACCUGAGCUACGU | |
| | UGCCCUGAGCAUCAACGGCGACAAGUUCCAGUACACCGG | |
| | CGCCAUGACCAGCAAGUUCCUGAUGGGCACCUACAAGCG | |
| | GGUCACCGAGAAGGGCGACGAGCACGUGCUGUCACUGGU | |
| | GUUCGGCAAGACCAAGGACCUGCCCGACCUGCGGGGCCCC | |
| | UUCAGCUACCCUAGUUUGACCAGCGCCCAGAGCGGCGAC | |
| | UACAGCUUGGUGAUCGUGACCACCUUCGUGCACUACGCC | |
| | AACUUCCACAACUACUUCGUGCCCAACCUGAAGGACAUG | |
| | UUCAGCCGGGCCGUGACCAUGACUGCCGCUUCUUACGCCC | |
| | GGUACGUGCUGCAGAAGCUGGUCCUGCUGGAGAUGAAGG | |
| | GCGGCUGCCGGGAGCCCGAGCUGGACACCGAAACACUGA | |
| | CCACCAUGUUCGAGGUGAGCGUGGCCUUCUUCAAGGUGG | |
| | GUCACGCGGUGGGCGAAACCGGCAACGGCUGCGUGGACU | |
| | UACGCUGGCUGGCCAAGAGCUUCUUCGAGCUGACCGUGC | |
| | UGAAGGAUAUCAUCGGCAUCUGCUACGGCGCCACCGUGA | |
| | AGGGCAUGCAGAGCUACGGCCUGGAGCGGCUGGCCGCCA | |
| | UGCUUAUGGCAACAGUGAAGAUGGAGGAGCUGGGACACC | |
| | UGACAACAGAGAAGCAGGAGUACGCCCUGAGACUGGCCA | |
| | CAGUGGGCUACCCAAAGGCCGGCGUGUACAGUGGACUGA | |
| | UCGGCGGCGCAACCAGCGUGCUGCUAUCCGCUUACAACCG | |
| | GCACCCGCUGUUCCAGCCCCUGCACACCGUGAUGCGGGAA | |
| | ACCCUGUUCAUCGGAAGCCACGUCGUGCUGCGGGAGCUG | |
| | AGGCUGAACGUAACCACCCAGGGCCCUAAUCUGGCCCUG | |
| | UAUCAGCUCCUCAGUACCGCCCUGUGCAGCGCCCUUGAGA | |
| | UCGGCGAGGUGCUCAGAGGCCUGGCCCUCGGUACCGAGA | |
| | GCGGCCUCUUCAGCCCAUGCUACUUAAGCCUGCGGUUCG | |
| | ACCUGACCCGGGACAAGUUGCUGAGCAUGGCCCCGCAGG | |
| | AGGCCACACUGGACCAGGCAGCUGUAUCCAACGCCGUGG | |
| | ACGGCUUCCUGGGCAGACUGUCCCUGGAACGGGAGGACC | |
| | GGGACGCCUGGCACCUGCCUGCCUACAAGUGUGUGGAUC | |
| | GGCUGGACAAGGUGCUGAUGAUCAUCCCUCUGAUUAAUG | |
| | UCACCUUCAUCAUCAGCAGCGACCGGGAGGUGCGGGGAU | |
| | CCGCCCUCUACGAGGCCAGCACCACCUAUCUGAGCAGCAG | |
| | CCUGUUCCUGUCUCCUGUGAUCAUGAACAAGUGCAGCCA | |
| | GGGCGCCGUGGCCGGCGAGCCCCGGCAGAUCCCCAAGAUC | |
| | CAGAACUUCACCCGGACCCAGAAGUCUUGCAUCUUCUGC | |
| | GGCUUCGCCCUUUUGUCCUACGACGAGAAGGAGGGCUUG | |
| | GAGACUACAACCUACAUCACCAGCCAGGAGGUGCAGAAC | |
| | AGCAUCCUGUCAUCUAAUUACUUCGACUUCGACAACCUG | |
| | CACGUUCAUUACCUGCUCCUCACCACCAACGGUACCGUCA | |
| | UGGAAAUCGCCGGACUGUACGAGGAGCGGGCCCAUGUUG | |
| | UGCUGGCCAUCAUCCUGUACUUCAUCGCUUUCGCACUUG | |
| | GCAUCUUCCUGGUGCACAAGAUCGUGAUGUUCUUCCUG | |
| 3′ UTR | UGAUAAUAGGCUGGAGCCUCGGUGGCCAUGCUUCUUGCC | 3 |
| | CCUUGGGCCUCCCCCCAGCCCCUCCUCCCCUUCCUGCACC | |
| | CGUACCCCCGUGGUCUUUGAAUAAAGUCUGAGUGGGCGG | |
| | C | |
| Corresponding | MQLLCVFCLVLLWEVGAASLSEVKLHLDIEGHASHYTIPWTE | 38 |
| amino acid | LMAKVPGLSPEALWREANVTEDLASMLNRYKLIYKTSGTLGI | |
| sequence | ALAEPVDIPAVSEGSMQVDASKVHPGVISGLNSPACMLSAPLE | |
| | KQLFYYIGTMLPNTRPHSYVFYQLRCHLSYVALSINGDKFQYT | |
| | GAMTSKFLMGTYKRVTEKGDEHVLSLVFGKTKDLPDLRGPFS | |
| | YPSLTSAQSGDYSLVIVTTFVHYANFHNYFVPNLKDMFSRAV | |
| | TMTAASYARYVLQKLVLLEMKGGCREPELDTETLTTMFEVS | |
| | VAFFKVGHAVGETGNGCVDLRWLAKSFFELTVLKDIIGICYG | |
| | ATVKGMQSYGLERLAAMLMATVKMEELGHLTTEKQEYALR | |
| | LATVGYPKAGVYSGLIGGATSVLLSAYNRHPLFQPLHTVMRE | |
| | TLFIGSHVVLRELRLNVTTQGPNLALYQLLSTALCSALEIGEVL | |
| | RGLALGTESGLFSPCYLSLRFDLTRDKLLSMAPQEATLDQAA | |
| | VSNAVDGFLGRLSLEREDRDAWHLPAYKCVDRLDKVLMIIPL | |
| | INVTFIISSDREVRGSALYEASTTYLSSSLFLSPVIMNKCSQGAV | |
| | AGEPRQIPKIQNFTRTQKSCIFCGFALLSYDEKEGLETTTYITSQ | |
| | EVQNSILSSNYFDFDNLHVHYLLLTTNGTVMEIAGLYEERAH | |
| | VVLAIILYFIAFALGIFLVHKIVMFFL | |
| PolyA tail | 100 nt | |

EBV gL (B95-8)

| SEQ ID NO: 184 consists of from 5′ end to 3′ end: | | 184 |
|---|---|---|
| 5′ UTR SEQ ID NO: 1, mRNA ORF SEQ ID NO: 80, and | | |
| 3′ UTR SEQ ID NO: 3 | | |
| Chemistry | 1-methylpseudouridine | |
| Cap | 7mG(5′)ppp(5′)NlmpNp | |
| 5′ UTR | GGGAAAUAAGAGAGAAAAGAAGAGUAAGAAGAAAUAUA | 1 |
| | AGAGCCACC | |
| ORF of mRNA | AUGAGAGCCGUGGGCGUGUUCCUGGCCAUCUGCCUGGUG | 80 |
| Construct | ACCAUCUUCGUGCUGCCCACCUGGGGCAACUGGGCCUACC | |
| (excluding | CCUGCUGCCACGUGACCCAGCUGAGAGCCCAGCACCUGCU | |
| the stop | GGCCCUGGAGAACAUCAGCGACAUCUACCUGGUGAGCAA | |
| codon) | CCAGACCUGCGACGGCUUCAGCCUGGCCAGCCUGAACAGC | |
| | CCCAAGAACGGCAGCAACCAGCUGGUGAUCAGCAGAUGC | |
| | GCCAACGGCCUGAACGUGGUGAGCUUCUUCAUCAGCAUC | |
| | CUGAAGAGAAGCAGCAGCGCCCUGACCGGCCACCUGAGA | |
| | GAGCUGCUGACCACCCUGGAGACCCUGUACGGCAGCUUC | |
| | AGCGUGGAGGACCUGUUCGGCGCCAACCUGAACAGAUAC | |
| | GCCUGGCACAGAGGCGGC | |
| 3′ UTR | UGAUAAUAGGCUGGAGCCUCGGUGGCCAUGCUUCUUGCC | 3 |
| | CCUUGGGCCUCCCCCCAGCCCCUCCUCCCCUUCCUGCACC | |
| | CGUACCCCCGUGGUCUUUGAAUAAAGUCUGAGUGGGCGG | |
| | C | |
| Corresponding | MRAVGVFLAICLVTIFVLPTWGNWAYPCCHVTQLRAQHLLA | 36 |
| amino acid | LENISDIYLVSNQTCDGFSLASLNSPKNGSNQLVISRCANGLNV | |
| sequence | VSFFISILKRSSSALTGHLRELLTTLETLYGSFSVEDLFGANLNR | |
| | YAWHRGG | |
| PolyA tail | 100 nt | |

EBV gp350_001 (modified)

| SEQ ID NO: 185 consists of from 5′ end to 3′ end: | | 185 |
|---|---|---|
| 5′ UTR SEQ ID NO: 1, mRNA ORF SEQ ID NO: 81, and | | |
| 3′ UTR SEQ ID NO: 3 | | |
| Chemistry | 1-methylpseudouridine | |
| Cap | 7mG(5′)ppp(5′)NlmpNp | |
| 5′ UTR | GGGAAAUAAGAGAGAAAAGAAGAGUAAGAAGAAAUAUA | 1 |
| | AGAGCCACC | |
| ORF of mRNA | AUGGAGGCAGCACUGCUGGUCUGCCAGUAUACAAUCCAG | 81 |
| Construct | UCGCUCAUUCAUCUGACAGGCGAGGACCCCGGCUUCUUU | |
| (excluding | AACGUGGAAAUCCCAGAGUUCCCUUUCUAUCCAACCUGU | |
| the stop | AACGUUUGCACUGCUGACGUGAACGUGACAAUCAAUUUC | |
| codon) | GACGUGGGAGGAAAGAAGCAUCAGCUUGAUCUGGAUUUC | |
| | GGCCAACUGACGCCACACACCAAAGCGGUGUACCAACCAA | |
| | GGGGUGCAUUUGGAGGGAGCGAGAAUGCUACAAAUCUGU | |
| | UCUUACUGGAACUGCUUGGUGCAGGAGAGCUGGCACUAA | |
| | CCAUGCGAAGCAAGAAGCUCCCCAUCAACGUUACCACCGG | |
| | GGAAGAACAGCAAGUCAGCCUUGAAUCCGUGGAUGUGUA | |
| | CUUUCAGGAUGUUUUCGGCACCAUGUGGUGUCACCACGC | |
| | UGAGAUGCAGAAUCCCGUGUAUCUCAUACCCGAGACUGU | |
| | ACCCUACAUCAAGUGGGAUAAUUGCAAUUCAACUAAUAU | |
| | UACGGCUGUGGUGAGGGCCCAGGGCUUGGACGUGACUCU | |
| | GCCCUUAUCUCUACCUACUUCUGCCCAAGACUCCAAUUUC | |
| | UCUGUCAAGACCGAGAUGCUCGGGAAUGAGAUCGAUAUC | |
| | GAGUGCAUCAUGGAGGACGGUGAGAUAAGCCAGGUUCUG | |
| | CCCGGCGACAACAAGUUCAAUAUCACUUGUUCUGGCUAC | |
| | GAGUCCCAUGUGCCUAGUGGUGGCAUACUCACAAGUACU | |
| | UCUCCCGUAGCCACGCCCAUUCCCGGAACCGGAUACGCCU | |
| | ACAGUCUGCGUCUGACCCCACGGCCUGUGUCCAGAUUCCU | |
| | GGGUAACAAUAGUAUCUUAUACGUGUUUUAUAGCGGAAA | |
| | CGGCCCUAAAGCGUCCGGAGGGGACUAUUGUAUUCAGAG | |
| | UAAUAUCGUUUUCUCUGAUGAGAUUCCUGCCAGUCAGGA | |
| | CAUGCCGACAAACACAACUGAUAUUACCUACGUGGGCGA | |
| | CAAUGCCACGUAUUCAGUGCCCAUGGUCACGAGCGAGGA | |
| | CGCCAAUUCACCAAAUGUUACUGUAACAGCUUUCUGGGC | |
| | CUGGCCAAAUAACACUGAGACUGACUUCAAAUGUAAGUG | |
| | GACUUUGACCUCUGGAACUCCGUCGGGUUGCGAGAAUAU | |
| | CAGCGGGGCCUUUGCUUCCAACAGGACUUUCGACAUCAC | |
| | UGUCUCAGGGCUGGGGACAGCACCGAAGACAUUAAUCAU | |
| | AACACGGACCGCCACCAACGCCACGACUACAACCCAUAAG | |
| | GUGAUCUUUUCCAAGGCACCUGAGUCCACCACUACCUCCC | |
| | CGACUCUUAACACUACGGGCUUCGCUGAUCCCAACACCAC | |
| | UACGGGGUUGCCUAGCUCGACACAUGUGCCGACGAACCU | |
| | GACUGCCCCUGCAUCGACCGGGCCCACAGUUUCGACCGCC | |
| | GAUGUGACAUCACCAACGCCCGCAGGUACAACCUCAGGC | |
| | GCCAGCCCAGUGACCCCUUCCCCAAGCCCCUGGGAUAAUG | |
| | GAACGGAGUCCAAGGCUCCUGAUAUGACUUCCUCUACCA | |
| | GCCCCGUGACUACACCCACUCCCAACGCAACUAGCCCAAC | |
| | CCCAGCUGUGACGACGCCCACCCCGAACGCGACAUCUCCC | |
| | ACACCUGCUGUGACAACCCCAACCCCUAACGCCACUAGCC | |
| | CUACCCUAGGUAAGACCAGUCCGACUAGCGCCGUUACAA | |
| | CCCCUACCCCUAACGCAACCGGCCCGACCGUGGGCGAGAC | |
| | UUCCCCGCAAGCCAAUGCGACAAAUCACACAUUGGGCGG | |
| | GACCUCUCCUACACCAGUCGUUACAUCUCAGCCUAAGAAC | |
| | GCUACCUCCGCUGUCACUACCGGACAGCACAACAUCACCA | |
| | GCUCAAGCACGAGUUCCAUGAGCUUGCGGCCGAGCUCAA | |
| | AUCCCGAGACCCUAUCACCAUCCACAUCAGACAACAGUAC | |
| | UUCACACAUGCCACUCUUGACGAGCGCUCACCCCACCGGC | |
| | GGCGAGAACAUCACCCAGGUGACUCCGGCGUCUAUUUCC | |
| | ACCCACCACGUCAGCACGUCGUCUCCCGCACCGAGACCAG | |
| | GGACGACUUCUCAGGCCAGUGGGCCUGGCAACUCCUCUA | |
| | CAAGCACAAAGCCAGGCGAAGUUAACGUGACAAAGGGAA | |
| | CGCCUCCCCAGAACGCAACCAGUCCUCAGGCGCCCAGCGG | |
| | GCAGAAGACUGCGGUGCCAACUGUGACCAGCACCGGUGG | |
| | CAAGGCCAACUCAACAACUGGAGGCAAGCAUACGACGGG | |
| | GCACGGCGCCCGGACCUCCACUGAACCCACGACCGAUUAC | |
| | GGAGGUGACAGCACAACACCGCGGCCACGAUAUAAUGCC | |
| | ACCACUUAUCUGCCACCAUCCACAAGCUCCAAGCUGCGGC | |
| | CACGGUGGACCUUCACAAGCCCACCCGUGACGACUGCCCA | |
| | AGCGACGGUGCCAGUGCCACCUACAAGCCAGCCACGCUUC | |
| | UCCAACCUUAGUAUGCUCGUUCUCCAGUGGGCCAGCCUU | |
| | GCUGUUCUGACCCUCCUCCUGCUGCUCGUGAUGGCCGAU | |
| | UGCGCCUUUAGGAGAAACCUCAGCACUAGCCACACGUAC | |
| | ACCACGCCGCCCUACGAUGACGCCGAGACUUACGUC | |
| 3′ UTR | UGAUAAUAGGCUGGAGCCUCGGUGGCCAUGCUUCUUGCC | 3 |
| | CCUUGGGCCUCCCCCCAGCCCCUCCUCCCCUUCCUGCACC | |
| | CGUACCCCCGUGGUCUUUGAAUAAAGUCUGAGUGGGCGG | |
| | C | |
| Corresponding | MEAALLVCQYTIQSLIHLTGEDPGFFNVEIPEFPFYPTCNVCTA | 28 |
| amino acid | DVNVTINFDVGGKKHQLDLDFGQLTPHTKAVYQPRGAFGGS | |
| sequence | ENATNLFLLELLGAGELALTMRSKKLPINVTTGEEQQVSLESV | |
| | DVYFQDVFGTMWCHHAEMQNPVYLIPETVPYIKWDNCNSTN | |
| | ITAVVRAQGLDVTLPLSLPTSAQDSNFSVKTEMLGNEIDIECIM | |
| | EDGEISQVLPGDNKFNITCSGYESHVPSGGILTSTSPVATPIPGT | |
| | GYAYSLRLTPRPVSRFLGNNSILYVFYSGNGPKASGGDYCIQS | |
| | NIVFSDEIPASQDMPTNTTDITYVGDNATYSVPMVTSEDANSP | |
| | NVTVTAFWAWPNNTETDFKCKWTLTSGTPSGCENISGAFASN | |
| | RTFDITVSGLGTAPKTLIITRTATNATTTTHKVIFSKAPESTTTS | |
| | PTLNTTGFADPNTTTGLPSSTHVPTNLTAPASTGPTVSTADVTS | |
| | PTPAGTTSGASPVTPSPSPWDNGTESKAPDMTSSTSPVTTPTPN | |
| | ATSPTPAVTTPTPNATSPTPAVTTPTPNATSPTLGKTSPTSAVT | |
| | TPTPNATGPTVGETSPQANATNHTLGGTSPTPVVTSQPKNATS | |
| | AVTTGQHNITSSSTSSMSLRPSSNPETLSPSTSDNSTSHMPLLTS | |
| | AHPTGGENITQVTPASISTHHVSTSSPAPRPGTTSQASGPGNSS | |
| | TSTKPGEVNVTKGTPPQNATSPQAPSGQKTAVPTVTSTGGKA | |
| | NSTTGGKHTTGHGARTSTEPTTDYGGDSTTPRPRYNATTYLPP | |
| | STSSKLRPRWTFTSPPVTTAQATVPVPPTSQPRFSNLSMLVLQ | |
| | WASLAVLTLLLLLVMADCAFRRNLSTSHTYTTPPYDDAETYV | |
| PolyA tail | 100 nt | |

LMP1 del 1-44_RX

| SEQ ID NO: 186 consists of from 5′ end to 3′ end: | | 186 |
|---|---|---|
| 5′ UTR SEQ ID NO: 1, mRNA ORF SEQ ID NO: 82, and | | |
| 3′ UTR SEQ ID NO: 3 | | |
| Chemistry | 1-methylpseudouridine | |
| Cap | 7mG(5′)ppp(5′)NlmpNp | |
| 5′ UTR | GGGAAAUAAGAGAGAAAAGAAGAGUAAGAAGAAAUAUA | 1 |
| | AGAGCCACC | |
| ORF of mRNA | AUGAGUGACUGGACAGGAGGAGCCCUCCUUGUCCUCUAU | 82 |
| Construct | UCCUUUGCUCUCAUGCUUAUAAUUAUCAUCCUGAUAAUC | |
| (excluding | UUUAUCUUCAGACGGGACCUUCUCUGUCCACUUGGAGCC | |
| the stop | CUUUGUAUACUCCUAUUGAUGAUCACCCUCCUCCUCAUC | |
| codon) | GCUCUCUGGAAUUUGCACGGACAGGCAUUGUUCCUUGGA | |
| | AUUGUGCUGUUCAUCUUCGGGUGCUUACUUGUCUUAGGU | |
| | AUCUGGAUCUACUUAUUGGAGAUGCUCUGGCGACUUGGU | |
| | GCCACCAUCUGGCAGCUUUUGGCCUUCUUCCUAGCGUUC | |
| | UUCCUCGACCUCAUUCUACUCAUUAUUGCUCUCUAUCUA | |
| | CAACAGAACUGGUGGACUCUAUUGGUUGAUCUCCUUUGG | |
| | CUCCUCCUGUUUCUGGCGAUUUUAAUCUGGAUGUAUUAC | |
| | CAUGGACAACGACACAGUGAUGAACACCACCACGAUGAC | |
| | UCCCUCCCGCACCCUCAACAAGCUACCGAUGAUUCUGGCC | |
| | AUGAAUCUGACUCUAACUCCAACGAGGGCAGACACCACC | |
| | UGCUCGUGAGUGGAGCCGGCGACGGACCACCACUCUGCU | |
| | CUCAGAACCUAGGCGCACCUGGAGGUGGUCCUGACAAUG | |
| | GCCCACAGGACCCUGACAACACGGAUGAUAACGGUCCAC | |
| | AAGACCCAGAUAACACUGACGACAAUGGACCGCAUGACC | |
| | CGCUGCCUCAGGAUCCUGAUAACACAGACGACAACGGCCC | |
| | ACAAGAUCCGGACAAUACCGACGAUAACGGACCGCACGA | |
| | CCCGUUACCUCAUAGCCCUAGCGACUCUGCUGGAAAUGA | |
| | UGGAGGCCCUCCACAAUUGACGGAAGAGGUUGAGAACAA | |
| | AGGAGGUGACCAGGGCCCGCCUUUGAUGACAGACGGAGG | |
| | CGGCGGUCAUAGUCAUGAUUCCGGCCAUGGCGGAGGAGA | |
| | UCCACACCUUCCUACGCUGCUGUUGGGUUCUUCUGGUUC | |
| | CGGUGGAGAUGAUGACGACCCGCACGGCCCAGUUCAGCU | |
| | AAGCUACUAUGAC | |
| 3′ UTR | UGAUAAUAGGCUGGAGCCUCGGUGGCCAUGCUUCUUGCC | 3 |
| | CCUUGGGCCUCCCCCCAGCCCCUCCUCCCCUUCCUGCACC | |
| | CGUACCCCCGUGGUCUUUGAAUAAAGUCUGAGUGGGCGG | |
| | C | |
| Corresponding | MSDWTGGALLVLYSFALMLIIIILIIFIFRRDLLCPLGALCILLLM | 83 |
| amino acid | ITLLLIALWNLHGQALFLGIVLFIFGCLLVLGIWIYLLEMLWRL | |
| sequence | GATIWQLLAFFLAFFLDLILLIIALYLQQNWWTLLVDLLWLLL | |
| | FLAILIWMYYHGQRHSDEHHHDDSLPHPQQATDDSGHESDSN | |
| | SNEGRHHLLVSGAGDGPPLCSQNLGAPGGGPDNGPQDPDNTD | |
| | DNGPQDPDNTDDNGPHDPLPQDPDNTDDNGPQDPDNTDDNG | |
| | PHDPLPHSPSDSAGNDGGPPQLTEEVENKGGDQGPPLMTDGG | |
| | GGHSHDSGHGGGDPHLPTLLLGSSGSGGDDDDPHGPVQLSYY | |
| | D | |
| PolyA tail | 100 nt | |

EBV gH (BXLF2)_RX

| SEQ ID NO: 187 consists of from 5′ end to 3′ end: | | 187 |
|---|---|---|
| 5′ UTR SEQ ID NO: 1, mRNA ORF SEQ ID NO: 84, and | | |
| 3′ UTR SEQ ID NO: 3 | | |
| Chemistry | 1-methylpseudouridine | |
| Cap | 7mG(5′)ppp(5′)NlmpNp | |
| 5′ UTR | GGGAAAUAAGAGAGAAAAGAAGAGUAAGAAGAAAUAUA | 1 |
| | AGAGCCACC | |
| ORF of mRNA | AUGCAGUUGUUGUGCGUGUUCUGCCUCGUGUUACUCUGG | 84 |
| Construct | GAGGUGGGCGCCGCCAGCCUUAGCGAGGUGAAGCUCCAC | |
| (excluding | UUGGACAUCGAGGGCCACGCCAGCCACUACACCAUCCCCU | |
| the stop | GGACCGAGCUCAUGGCCAAGGUGCCCGGCCUUAGCCCCGA | |
| codon) | GGCCCUGUGGCGGGAGGCCAACGUGACCGAGGACCUGGC | |
| | CAGCAUGCUGAACCGGUACAAGCUGAUCUACAAGACCAG | |
| | CGGCACCCUGGGCAUCGCCCUGGCCGAGCCCGUGGACAUC | |
| | CCCGCCGUUAGCGAAGGCAGCAUGCAGGUGGACGCCAGC | |
| | AAGGUGCACCCCGGCGUGAUCAGCGGCCUGAACAGCCCCG | |
| | CCUGUAUGUUGAGCGCCCCACUGGAGAAGCAGCUGUUCU | |
| | ACUACAUCGGCACCAUGCUGCCCAACACCCGGCCCCACAG | |
| | CUACGUGUUCUACCAGCUGCGGUGCCACCUGAGCUACGU | |
| | UGCCCUGAGCAUCAACGGCGACAAGUUCCAGUACACCGG | |
| | CGCCAUGACCAGCAAGUUCCUGAUGGGCACCUACAAGCG | |
| | GGUCACCGAGAAGGGCGACGAGCACGUGCUGUCACUGGU | |
| | GUUCGGCAAGACCAAGGACCUGCCCGACCUGCGGGGCCCC | |
| | UUCAGCUACCCUAGUUUGACCAGCGCCCAGAGCGGCGAC | |
| | UACAGCUUGGUGAUCGUGACCACCUUCGUGCACUACGCC | |
| | AACUUCCACAACUACUUCGUGCCCAACCUGAAGGACAUG | |
| | UUCAGCCGGGCCGUGACCAUGACUGCCGCUUCUUACGCCC | |
| | GGUACGUGCUGCAGAAGCUGGUCCUGCUGGAGAUGAAGG | |
| | GCGGCUGCCGGGAGCCCGAGCUGGACACCGAAACACUGA | |
| | CCACCAUGUUCGAGGUGAGCGUGGCCUUCUUCAAGGUGG | |
| | GUCACGCGGUGGGCGAAACCGGCAACGGCUGCGUGGACU | |
| | UACGCUGGCUGGCCAAGAGCUUCUUCGAGCUGACCGUGC | |
| | UGAAGGAUAUCAUCGGCAUCUGCUACGGCGCCACCGUGA | |
| | AGGGCAUGCAGAGCUACGGCCUGGAGCGGCUGGCCGCCA | |
| | UGCUUAUGGCAACAGUGAAGAUGGAGGAGCUGGGACACC | |
| | UGACAACAGAGAAGCAGGAGUACGCCCUGAGACUGGCCA | |
| | CAGUGGGCUACCCAAAGGCCGGCGUGUACAGUGGACUGA | |
| | UCGGCGGCGCAACCAGCGUGCUGCUAUCCGCUUACAACCG | |
| | GCACCCGCUGUUCCAGCCCCUGCACACCGUGAUGCGGGAA | |
| | ACCCUGUUCAUCGGAAGCCACGUCGUGCUGCGGGAGCUG | |
| | AGGCUGAACGUAACCACCCAGGGCCCUAAUCUGGCCCUG | |
| | UAUCAGCUCCUCAGUACCGCCCUGUGCAGCGCCCUUGAGA | |
| | UCGGCGAGGUGCUCAGAGGCCUGGCCCUCGGUACCGAGA | |
| | GCGGCCUCUUCAGCCCAUGCUACUUAAGCCUGCGGUUCG | |
| | ACCUGACCCGGGACAAGUUGCUGAGCAUGGCCCCGCAGG | |
| | AGGCCACACUGGACCAGGCAGCUGUAUCCAACGCCGUGG | |
| | ACGGCUUCCUGGGCAGACUGUCCCUGGAACGGGAGGACC | |
| | GGGACGCCUGGCACCUGCCUGCCUACAAGUGUGUGGAUC | |
| | GGCUGGACAAGGUGCUGAUGAUCAUCCCUCUGAUUAAUG | |
| | UCACCUUCAUCAUCAGCAGCGACCGGGAGGUGCGGGGAU | |
| | CCGCCCUCUACGAGGCCAGCACCACCUAUCUGAGCAGCAG | |
| | CCUGUUCCUGUCUCCUGUGAUCAUGAACAAGUGCAGCCA | |
| | GGGCGCCGUGGCCGGCGAGCCCCGGCAGAUCCCCAAGAUC | |
| | CAGAACUUCACCCGGACCCAGAAGUCUUGCAUCUUCUGC | |
| | GGCUUCGCCCUUUUGUCCUACGACGAGAAGGAGGGCUUG | |
| | GAGACUACAACCUACAUCACCAGCCAGGAGGUGCAGAAC | |
| | AGCAUCCUGUCAUCUAAUUACUUCGACUUCGACAACCUG | |
| | CACGUUCAUUACCUGCUCCUCACCACCAACGGUACCGUCA | |
| | UGGAAAUCGCCGGACUGUACGAGGAGCGGGCCCAUGUUG | |
| | UGCUGGCCAUCAUCCUGUACUUCAUCGCUUUCGCACUUG | |
| | GCAUCUUCCUGGUGCACAAGAUCGUGAUGUUCUUCCUG | |
| 3′ UTR | UGAUAAUAGGCUGGAGCCUCGGUGGCCAUGCUUCUUGCC | 3 |
| | CCUUGGGCCUCCCCCCAGCCCCUCCUCCCCUUCCUGCACC | |
| | CGUACCCCCGUGGUCUUUGAAUAAAGUCUGAGUGGGCGG | |
| | C | |
| Corresponding | MQLLCVFCLVLLWEVGAASLSEVKLHLDIEGHASHYTIPWTE | 38 |
| amino acid | LMAKVPGLSPEALWREANVTEDLASMLNRYKLIYKTSGTLGI | |
| sequence | ALAEPVDIPAVSEGSMQVDASKVHPGVISGLNSPACMLSAPLE | |
| | KQLFYYIGTMLPNTRPHSYVFYQLRCHLSYVALSINGDKFQYT | |
| | GAMTSKFLMGTYKRVTEKGDEHVLSLVFGKTKDLPDLRGPFS | |
| | YPSLTSAQSGDYSLVIVTTFVHYANFHNYFVPNLKDMFSRAV | |
| | TMTAASYARYVLQKLVLLEMKGGCREPELDTETLTTMFEVS | |
| | VAFFKVGHAVGETGNGCVDLRWLAKSFFELTVLKDIIGICYG | |
| | ATVKGMQSYGLERLAAMLMATVKMEELGHLTTEKQEYALR | |
| | LATVGYPKAGVYSGLIGGATSVLLSAYNRHPLFQPLHTVMRE | |
| | TLFIGSHVVLRELRLNVTTQGPNLALYQLLSTALCSALEIGEVL | |
| | RGLALGTESGLFSPCYLSLRFDLTRDKLLSMAPQEATLDQAA | |
| | VSNAVDGFLGRLSLEREDRDAWHLPAYKCVDRLDKVLMIIPL | |
| | INVTFIISSDREVRGSALYEASTTYLSSSLFLSPVIMNKCSQGAV | |
| | AGEPRQIPKIQNFTRTQKSCIFCGFALLSYDEKEGLETTTYITSQ | |
| | EVQNSILSSNYFDFDNLHVHYLLLTTNGTVMEIAGLYEERAH | |
| | VVLAIILYFIAFALGIFLVHKIVMFFL | |
| PolyA tail | 100 nt | |

EBV gL (B95-8)

| SEQ ID NO: 188 consists of from 5′ end to 3′ end: | | 188 |
|---|---|---|
| 5′ UTR SEQ ID NO: 1, mRNA ORF SEQ ID NO: 85, and | | |
| 3′ UTR SEQ ID NO: 3 | | |
| Chemistry | 1-methylpseudouridine | |
| Cap | 7mG(5′)ppp(5′)NlmpNp | |
| 5′ UTR | GGGAAAUAAGAGAGAAAAGAAGAGUAAGAAGAAAUAUA | 1 |
| | AGAGCCACC | |
| ORF of mRNA | AUGAGAGCCGUGGGCGUGUUCCUGGCCAUCUGCCUGGUG | 85 |
| Construct | ACCAUCUUCGUGCUGCCCACCUGGGGCAACUGGGCCUACC | |
| (excluding | CCUGCUGCCACGUGACCCAGCUGAGAGCCCAGCACCUGCU | |
| the stop | GGCCCUGGAGAACAUCAGCGACAUCUACCUGGUGAGCAA | |
| codon) | CCAGACCUGCGACGGCUUCAGCCUGGCCAGCCUGAACAGC | |
| | CCCAAGAACGGCAGCAACCAGCUGGUGAUCAGCAGAUGC | |
| | GCCAACGGCCUGAACGUGGUGAGCUUCUUCAUCAGCAUC | |
| | CUGAAGAGAAGCAGCAGCGCCCUGACCGGCCACCUGAGA | |
| | GAGCUGCUGACCACCCUGGAGACCCUGUACGGCAGCUUC | |
| | AGCGUGGAGGACCUGUUCGGCGCCAACCUGAACAGAUAC | |
| | GCCUGGCACAGAGGCGGC | |
| 3′ UTR | UGAUAAUAGGCUGGAGCCUCGGUGGCCAUGCUUCUUGCC | 3 |
| | CCUUGGGCCUCCCCCCAGCCCCUCCUCCCCUUCCUGCACC | |
| | CGUACCCCCGUGGUCUUUGAAUAAAGUCUGAGUGGGCGG | |
| | C | |
| Corresponding | MRAVGVFLAICLVTIFVLPTWGNWAYPCCHVTQLRAQHLLA | 36 |
| amino acid | LENISDIYLVSNQTCDGFSLASLNSPKNGSNQLVISRCANGLNV | |
| sequence | VSFFISILKRSSSALTGHLRELLTTLETLYGSFSVEDLFGANLNR | |
| | YAWHRGG | |
| PolyA tail | 100 nt | |

EBV gp42 (B95-8)_DX

| SEQ ID NO: 189 consists of from 5′ end to 3′ end: | | 189 |
|---|---|---|
| 5′ UTR SEQ ID NO: 1, mRNA ORF SEQ ID NO: 86, and | | |
| 3′ UTR SEQ ID NO: 3 | | |
| Chemistry | 1-methylpseudouridine | |
| Cap | 7mG(5′)ppp(5′)NlmpNp | |
| 5′ UTR | GGGAAAUAAGAGAGAAAAGAAGAGUAAGAAGAAAUAUA | 1 |
| | AGAGCCACC | |
| ORF of mRNA | AUGGUGAGCUUCAAGCAGGUGAGAGUGCCCCUGUUCACC | 86 |
| Construct | GCCAUCGCCCUGGUGAUCGUGCUGCUGCUGGCCUACUUCC | |
| (excluding | UGCCCCCCAGAGUGAGAGGCGGCGGCAGAGUGGCCGCCG | |
| the stop | CCGCCAUCACCUGGGUGCCCAAGCCCAACGUGGAGGUGU | |
| codon) | GGCCCGUGGACCCCCCACCCCCCGUGAACUUCAACAAGAC | |
| | CGCCGAGCAGGAGUACGGCGACAAGGAGGUGAAGCUGCC | |
| | CCACUGGACCCCCACCCUGCACACCUUCCAGGUGCCCCAG | |
| | AACUACACCAAGGCCAACUGCACCUACUGCAACACCAGAG | |
| | AGUACACCUUCAGCUACAAGGGCUGCUGCUUCUACUUCA | |
| | CCAAGAAGAAGCACACCUGGAACGGCUGCUUCCAGGCCU | |
| | GCGCCGAGCUGUACCCCUGCACCUACUUCUACGGCCCCAC | |
| | CCCCGACAUCCUGCCCGUGGUGACCAGAAACCUGAACGCC | |
| | AUCGAGAGCCUGUGGGUGGGCGUGUACAGAGUGGGCGAG | |
| | GGCAACUGGACCAGCCUGGACGGCGGCACCUUCAAGGUG | |
| | UACCAGAUCUUCGGCAGCCACUGCACCUACGUGAGCAAG | |
| | UUCAGCACCGUGCCCGUGAGCCACCACGAGUGCAGCUUCC | |
| | UGAAGCCCUGCCUGUGCGUGAGCCAGAGAAGCAACAGC | |
| 3′ UTR | UGAUAAUAGGCUGGAGCCUCGGUGGCCAUGCUUCUUGCC | 3 |
| | CCUUGGGCCUCCCCCCAGCCCCUCCUCCCCUUCCUGCACC | |
| | CGUACCCCCGUGGUCUUUGAAUAAAGUCUGAGUGGGCGG | |
| | C | |
| Corresponding | MVSFKQVRVPLFTAIALVIVLLLAYFLPPRVRGGGRVAAAAIT | 34 |
| amino acid | WVPKPNVEVWPVDPPPPVNFNKTAEQEYGDKEVKLPHWTPT | |
| sequence | LHTFQVPQNYTKANCTYCNTREYTFSYKGCCFYFTKKKHTW | |
| | NGCFQACAELYPCTYFYGPTPDILPVVTRNLNAIESLWVGVYR | |
| | VGEGNWTSLDGGTFKVYQIFGSHCTYVSKFSTVPVSHHECSFL | |
| | KPCLCVSQRSNS | |
| PolyA tail | 100 nt | |

gp350 D123_LS_RX

| SEQ ID NO: 190 consists of from 5′ end to 3′ end: | | 190 |
|---|---|---|
| 5′ UTR SEQ ID NO: 1, mRNA ORF SEQ ID NO: 87, and | | |
| 3′ UTR SEQ ID NO: 3 | | |
| Chemistry | 1-methylpseudouridine | |
| Cap | 7mG(5′)ppp(5′)NlmpNp | |
| 5′ UTR | GGGAAAUAAGAGAGAAAAGAAGAGUAAGAAGAAAUAUA | 1 |
| | AGAGCCACC | |
| ORF of mRNA | AUGGACAGCAAGGGCAGCAGCCAGAAGGGAAGCAGGUUG | 87 |
| Construct | UUAUUGCUUUUAGUGGUGAGCAACUUACUCUUACCCCAG | |
| (excluding | AUCCAGUCGCUCAUUCAUUUGACAGGCGAGGACCCCGGC | |
| the stop | UUCUUUAACGUGGAAAUCCCAGAGUUCCCUUUCUAUCCA | |
| codon) | ACCUGUAACGUUUGCACAGCCGACGUGAACGUGACAAUC | |
| | AAUUUCGACGUGGGAGGAAAGAAGCAUCAGCUUGAUCUG | |
| | GAUUUCGGCCAACUGACGCCACACACCAAAGCGGUGUAC | |
| | CAACCAAGGGGUGCAUUUGGAGGGAGCGAGAAUGCUACA | |
| | AAUCUGUUCUUACUGGAACUGCUUGGUGCAGGAGAGCUG | |
| | GCACUAACCAUGCGAAGCAAGAAGCUCCCCAUCAACGUU | |
| | ACCACCGGGGAAGAACAGCAAGUCAGCCUUGAAUCCGUG | |
| | GAUGUGUACUUUCAGGAUGUUUUCGGCACCAUGUGGUGU | |
| | CACCACGCUGAGAUGCAGAAUCCCGUGUAUCUCAUACCC | |
| | GAGACUGUACCCUACAUCAAGUGGGAUAAUUGCAAUUCA | |
| | ACUAAUAUUACGGCUGUGGUGAGGGCCCAGGGCUUGGAC | |
| | GUGACUCUGCCCUUAUCUCUACCUACUUCUGCCCAAGACU | |
| | CCAAUUUCUCUGUCAAGACCGAGAUGCUCGGGAAUGAGA | |
| | UCGAUAUCGAGUGCAUCAUGGAGGACGGUGAGAUAAGCC | |
| | AGGUUCUGCCCGGCGACAACAAGUUCAAUAUCACUUGUU | |
| | CUGGCUACGAGUCCCAUGUGCCUAGUGGUGGCAUACUCA | |
| | CAAGUACUUCUCCCGUAGCCACGCCCAUUCCCGGAACCGG | |
| | AUACGCCUACAGUCUGCGUCUGACCCCACGGCCUGUGUCC | |
| | AGAUUCCUGGGUAACAAUAGUAUCUUAUACGUGUUUUAU | |
| | AGCGGAAACGGCCCUAAAGCGUCCGGAGGGGACUAUUGU | |
| | AUUCAGAGUAAUAUCGUUUUCUCUGAUGAGAUCCCUGCC | |
| | AGUCAGGACAUGCCGACAAACACAACUGAUAUUACCUAC | |
| | GUGGGCGACAAUGCCACGUAUUCAGUGCCCAUGGUCACG | |
| | AGCGAGGACGCCAAUUCACCAAAUGUUACUGUAACAGCU | |
| | UUCUGGGCCUGGCCAAAUAACACUGAGACUGACUUCAAA | |
| | UGUAAGUGGACUUUGACCUCUGGAACUCCGUCGGGUUGC | |
| | GAGAAUAUCAGCGGGGCCUUUGCUUCCAACAGGACUUUC | |
| | GACAUCACUGUCUCAGGGCUGGGGACAGCACCGAAGACA | |
| | UUAAUCAUAACACGGACCGCCACCAACGCCACGACUACAA | |
| | CCCAUAAGGUGAUCUUUUCCAAGGCACCUGGCAGCGGCA | |
| | GCGCAGGCUCUGCAAGCGGCGGCGCCUCCAGCGGCUCCGG | |
| | AGGUGCCAGCAUGCAGAUCUACGAGGGCAAGCUGACCGC | |
| | CGAGGGCCUGAGGUUCGGCAUCGUGGCCAGCAGGUUCAA | |
| | CCACGCCCUGGUGGACAGGCUGGUGGAAGGCGCCAUCGA | |
| | CGCCAUCGUGAGGCACGGCGGCAGGGAGGAGGACAUCAC | |
| | CCUGGUGCGGGUGCCCGGCAGCUGGGAGAUCCCCGUGGC | |
| | CGCCGGCGAGCUGGCCAGGAAGGAAGAUAUUGAUGCAGU | |
| | GAUCGCCAUCGGCGUGCUGAUCAGGGGCGCCACCCCACAC | |
| | UUCGACUACAUCGCCAGCGAAGUGAGCAAGGGACUGGCG | |
| | GACCUGAGCCUGGAGCUGAGGAAGCCCAUCACCUUCGGC | |
| | GUGAUCACCGCCGACACCCUGGAGCAGGCCAUCGAGAGG | |
| | GCCGGCACCAAGCACGGCAACAAGGGAUGGGAGGCCGCC | |
| | CUGAGCGCUAUCGAAAUGGCCAACCUCUUCAAGAGCCUG | |
| | AGG | |
| 3′UTR | UGAUAAUAGGCUGGAGCCUCGGUGGCCAUGCUUCUUGCC | 3 |
| | CCUUGGGCCUCCCCCCAGCCCCUCCUCCCCUUCCUGCACC | |
| | CGUACCCCCGUGGUCUUUGAAUAAAGUCUGAGUGGGCGG | |
| | C | |
| Corresponding | MDSKGSSQKGSRLLLLLVVSNLLLPQGVVEAALLVCQYTIQS | 88 |
| amino acid | LIHLTGEDPGFFNVEIPEFPFYPTCNVCTADVNVTINFDVGGKK | |
| sequence | HQLDLDFGQLTPHTKAVYQPRGAFGGSENATNLFLLELLGAG | |
| | ELALTMRSKKLPINVTTGEEQQVSLESVDVYFQDVFGTMWCH | |
| | HAEMQNPVYLIPETVPYIKWDNCNSTNITAVVRAQGLDVTLP | |
| | LSLPTSAQDSNFSVKTEMLGNEIDIECIMEDGEISQVLPGDNKF | |
| | NITCSGYESHVPSGGILTSTSPVATPIPGTGYAYSLRLTPRPVSR | |
| | FLGNNSILYVFYSGNGPKASGGDYCIQSNIVFSDEIPASQDMPT | |
| | NTTDITYVGDNATYSVPMVTSEDANSPNVTVTAFWAWPNNT | |
| | ETDFKCKWTLTSGTPSGCENISGAFASNRTFDITVSGLGTAPKT | |
| | LIITRTATNATTTTHKVIFSKAPGSGSAGSASGGASSGSGGASM | |
| | QIYEGKLTAEGLRFGIVASRFNHALVDRLVEGAIDAIVRHGGR | |
| | EEDITLVRVPGSWEIPVAAGELARKEDIDAVIAIGVLIRGATPH | |
| | FDYIASEVSKGLADLSLELRKPITFGVITADTLEQAIERAGTKH | |
| | GNKGWEAALSAIEMANLFKSLR | |
| PolyA tail | 100 nt | |

gp350_D123_HBsAg_RX

| SEQ ID NO: 191 consists of from 5′ end to 3′ end: | | 191 |
|---|---|---|
| 5′ UTR SEQ ID NO: 1, mRNA ORF SEQ ID NO: 89, and | | |
| 3′ UTR SEQ ID NO: 3 | | |
| Chemistry | 1-methylpseudouridine | |
| Cap | 7mG(5′)ppp(5′)NlmpNp | |
| 5′ UTR | GGGAAAUAAGAGAGAAAAGAAGAGUAAGAAGAAAUAUA | 1 |
| | AGAGCCACC | |
| ORF of mRNA | AUGGACAGCAAGGGCAGCAGCCAGAAGGGCAGUAGGCUC | 89 |
| Construct | CUUUUGCUACUUGUGGUGAGCAACCUCUUGUUACCCCAG | |
| (excluding | GGCGUGGUGGAGGCAGCACUCCUCGUCUGCCAGUAUACA | |
| the stop | AUCCAGUCGCUCAUUCAUUUGACAGGCGAGGACCCCGGC | |
| codon) | UUCUUUAACGUGGAAAUCCCAGAGUUCCCUUUCUAUCCA | |
| | ACCUGUAACGUUUGCACGGCAGACGUGAACGUGACAAUC | |
| | AAUUUCGACGUGGGAGGAAAGAAGCAUCAGCUUGAUCUG | |
| | GAUUUCGGCCAACUGACGCCACACACCAAAGCGGUGUAC | |
| | CAACCAAGGGGUGCAUUUGGAGGGAGCGAGAAUGCUACA | |
| | AAUCUGUUCUUACUGGAACUGCUUGGUGCAGGAGAGCUG | |
| | GCACUAACCAUGCGAAGCAAGAAGCUCCCCAUCAACGUU | |
| | ACCACCGGGGAAGAACAGCAAGUCAGCCUUGAAUCCGUG | |
| | GAUGUGUACUUUCAGGAUGUUUUCGGCACCAUGUGGUGU | |
| | CACCACGCUGAGAUGCAGAAUCCCGUGUAUCUCAUACCC | |
| | GAGACUGUACCCUACAUCAAGUGGGAUAAUUGCAAUUCA | |
| | ACUAAUAUUACGGCUGUAGUGAGGGCCCAGGGCUUGGAC | |
| | GUGACUCUGCCCUUAUCUCUACCUACUUCUGCCCAAGACU | |
| | CCAAUUUCUCUGUCAAGACCGAGAUGCUCGGGAAUGAGA | |
| | UCGAUAUCGAGUGCAUCAUGGAGGACGGUGAGAUAAGCC | |
| | AGGUUCUGCCCGGCGACAACAAGUUCAAUAUCACUUGUU | |
| | CUGGCUACGAGUCCCAUGUGCCUAGUGGUGGCAUACUCA | |
| | CAAGUACUUCUCCCGUAGCCACGCCCAUUCCCGGAACCGG | |
| | AUACGCCUACAGUCUGCGUCUGACCCCACGGCCUGUGUCC | |
| | AGAUUCCUGGGUAACAAUAGUAUCUUAUACGUGUUUUAU | |
| | AGCGGAAACGGCCCUAAAGCGUCCGGAGGGGACUAUUGU | |
| | AUUCAGAGUAAUAUCGUUUUCUCUGAUGAGAUUCCAGCC | |
| | AGUCAGGACAUGCCGACAAACACAACUGAUAUUACCUAC | |
| | GUGGGCGACAAUGCCACGUAUUCAGUGCCCAUGGUCACG | |
| | AGCGAGGACGCCAAUUCACCAAAUGUUACUGUAACAGCU | |
| | UUCUGGGCCUGGCCAAAUAACACUGAGACUGACUUCAAA | |
| | UGUAAGUGGACUUUGACCUCUGGAACUCCGUCGGGUUGC | |
| | GAGAAUAUCAGCGGGGCCUUUGCUUCCAACAGGACUUUC | |
| | GACAUCACUGUCUCAGGGCUGGGGACAGCACCGAAGACA | |
| | UUAAUCAUAACACGGACCGCCACCAACGCCACGACUACAA | |
| | CCCAUAAGGUGAUCUUUUCCAAGGCACCUGGCAGCGGCA | |
| | GCGCUGGCUCCGCUAGCGGCGGCGCCUCUAGCGGAUCAG | |
| | GAGGCGCAUCCAUGGAGAACAUUGCAUCUGGCCUGCUGG | |
| | GACCUCUACUGGUGCUGCAGGCCGGAUUCUUCCUGCUGA | |
| | CCAAGAUCCUGACCAUCCCUCAGAGCCUGGACAGCUGGU | |
| | GGACCAGCCUGAACUUCCUGGGCGGCACCCCAGUGUGCCU | |
| | GGGCCAGAACAGCCAGAGCCAGAUCUCCUCCCACAGCCCC | |
| | ACCUGCUGUCCGCCCAUCUGCCCCGGCUACCGUUGGAUGU | |
| | GCCUGAGGAGGUUCAUCAUCUUCCUGUGCAUACUCCUGU | |
| | UGUGUCUAAUUUUCCUGCUCGUUCUGCUCGACUACCAGG | |
| | GCAUGCUGCCGGUGUGUCCUCUGAUCCCCGGCUCCUCCAC | |
| | CACCAGCACCGGCCCCUGCAGGACCUGCACCACACCAGCA | |
| | CAAGGUACCAGCAUGUUCCCCAGCUGUUGCUGUACCAAG | |
| | CCCACCGACGGCAACUGCACCUGCAUCCCCAUCCCCAGCA | |
| | GCUGGGCCUUCGCCAAGUACCUGUGGGAGUGGGCCAGCG | |
| | UGAGGUUCAGCUGGCUGUCACUUCUUGCGCCAUUCGUGC | |
| | AGUGGUUCGUGGGCCUGAGCCCUACUGUGUGGCUGUCGG | |
| | UAAUCUGGAUGAUGUGGUUCUGGGGCCCCAGCCUGUACA | |
| | ACAUCCUGUCACCGUUCAUGCCUCUCCUACCGCUGUUCUU | |
| | CUGCCUGUGGGUGUACAUC | |
| 3′ UTR | UGAUAAUAGGCUGGAGCCUCGGUGGCCAUGCUUCUUGCC | 3 |
| | CCUUGGGCCUCCCCCCAGCCCCUCCUCCCCUUCCUGCACC | |
| | CGUACCCCCGUGGUCUUUGAAUAAAGUCUGAGUGGGCGG | |
| | C | |
| Corresponding | MDSKGSSQKGSRLLLLLVVSNLLLPQGVVEAALLVCQYTIQS | 90 |
| amino acid | LIHLTGEDPGFFNVEIPEFPFYPTCNVCTADVNVTINFDVGGKK | |
| sequence | HQLDLDFGQLTPHTKAVYQPRGAFGGSENATNLFLLELLGAG | |
| | ELALTMRSKKLPINVTTGEEQQVSLESVDVYFQDVFGTMWCH | |
| | HAEMQNPVYLIPETVPYIKWDNCNSTNITAVVRAQGLDVTLP | |
| | LSLPTSAQDSNFSVKTEMLGNEIDIECIMEDGEISQVLPGDNKF | |
| | NITCSGYESHVPSGGILTSTSPVATPIPGTGYAYSLRLTPRPVSR | |
| | FLGNNSILYVFYSGNGPKASGGDYCIQSNIVFSDEIPASQDMPT | |
| | NTTDITYVGDNATYSVPMVTSEDANSPNVTVTAFWAWPNNT | |
| | ETDFKCKWTLTSGTPSGCENISGAFASNRTFDITVSGLGTAPKT | |
| | LIITRTATNATTTTHKVIFSKAPGSGSAGSASGGASSGSGGASM | |
| | ENIASGLLGPLLVLQAGFFLLTKILTIPQSLDSWWTSLNFLGGT | |
| | PVCLGQNSQSQISSHSPTCCPPICPGYRWMCLRRFIIFLCILLLC | |
| | LIFLLVLLDYQGMLPVCPLIPGSSTTSTGPCRTCTTPAQGTSMF | |
| | PSCCCTKPTDGNCTCIPIPSSWAFAKYLWEWASVRFSWLSLLA | |
| | PFVQWFVGLSPTVWLSVIWMMWFWGPSLYNILSPFMPLLPLF | |
| | FCLWVYI | |
| PolyA tail | 100 nt | |

gp350 D123_HBcAg_heterotandem_RX

| SEQ ID NO: 192 consists of from 5′ end to 3′ end: | | 192 |
|---|---|---|
| 5′ UTR SEQ ID NO: 1, mRNA ORF SEQ ID NO: 91, and | | |
| 3′ UTR SEQ ID NO: 3 | | |
| Chemistry | 1-methylpseudouridine | |
| Cap | 7mG(5′)ppp(5′)NlmpNp | |
| 5′ UTR | GGGAAAUAAGAGAGAAAAGAAGAGUAAGAAGAAAUAUA | 1 |
| | AGAGCCACC | |
| ORF of mRNA | AUGGACAGCAAGGGCAGCAGCCAGAAGGGAUCCAGGCUA | 91 |
| Construct | UUGUUACUAUUAGUGGUGAGCAACCUCCUCUUGCCCCAG | |
| (excluding | GGCGUGGUGGACAUCGACCCCUACAAGGAGUUCGGCGCC | |
| the stop | ACCGUGGAGUUGUUAAGCUUCCUCCCCAGCGACUUCUUC | |
| codon) | CCCAGCGUGAGGGACCUGCUGGACACCGCCGCCGCCCUGU | |
| | ACAGGGAGGCCCUGGAGAGCCCCGAGCACUGCUCGCCUCA | |
| | CCACACCGCCCUGAGGCAGGCCAUCCUGUGCUGGGGCGAG | |
| | CUGAUGACCCUGGCCACCUGGGUGGGCAACAACCUGGAG | |
| | GACCCCGCCAGCCGCGACCUCGUUGUGAACUACGUGAACA | |
| | CCAACAUGGGCCUGAAGAUCAGGCAGCUGCUGUGGUUCC | |
| | ACAUCAGCUGCCUGACCUUCGGCAGGGAGACAGUGCUGG | |
| | AGUACCUGGUGAGCUUCGGCGUGUGGAUCAGGACUCCAC | |
| | CCGCCUACAGGCCUCCCAACGCGCCAAUCCUGAGCACCCU | |
| | GCCCGAGACAACAGUGGUGGGCAGCGGCAGCGCAGGUUC | |
| | CGCCAGCGGCGGCGCAUCCAGUGGCUCUGGAGGAGCUUC | |
| | UGACAUUGACCCAUAUAAGGAAUUCGGUGCUACAGUAGA | |
| | GCUACUGUCUUUCUUGCCUAGUGAUUUCUUCCCGAGUGU | |
| | AAGGGAUCUCCUAGAUACAGCCGCUGCUCUAUAUAGAGA | |
| | GGCACUGGAAUCUCCAGAGCACUGUUCCCCACACCAUACC | |
| | GCUCUCCGGCAGGCAAUCCUGUGUUGGGGUGAACUUAUG | |
| | ACACUGGCAACCUGGGUCGGUAACAACGGAUCAGGUGAG | |
| | GCGGCUCUGCUGGUCUGCCAGUAUACAAUCCAGUCGCUC | |
| | AUUCAUCUGACAGGCGAAGAUCCAGGUUUCUUUAACGUG | |
| | GAAAUCCCAGAGUUCCCUUUCUAUCCAACCUGUAACGUU | |
| | UGUACAGCUGACGUGAACGUGACAAUCAAUUUCGACGUG | |
| | GGAGGAAAGAAGCAUCAGCUUGAUCUGGAUUUCGGCCAA | |
| | CUGACGCCACACACCAAAGCGGUGUACCAACCAAGGGGU | |
| | GCAUUUGGAGGGAGCGAGAAUGCUACAAAUCUGUUCUUA | |
| | CUGGAACUGCUUGGUGCAGGAGAGCUGGCACUAACCAUG | |
| | CGAAGCAAGAAGCUCCCCAUCAACGUUACCACCGGGGAA | |
| | GAACAGCAAGUCAGCCUUGAAUCCGUGGAUGUGUACUUU | |
| | CAGGAUGUUUUCGGCACCAUGUGGUGUCACCACGCUGAG | |
| | AUGCAGAAUCCCGUGUAUCUCAUACCCGAGACUGUACCC | |
| | UACAUCAAGUGGGAUAAUUGCAAUUCAACUAAUAUUACG | |
| | GCUGUGGUGAGGGCCCAGGGCUUGGACGUGACUCUGCCC | |
| | UUAUCUCUACCUACUUCUGCCCAAGACUCCAAUUUCUCU | |
| | GUCAAGACCGAGAUGCUCGGGAAUGAGAUCGAUAUCGAG | |
| | UGCAUCAUGGAGGACGGUGAGAUAAGCCAGGUUCUGCCC | |
| | GGCGACAACAAGUUCAAUAUCACUUGUUCUGGCUACGAG | |
| | UCCCAUGUGCCUUCUGGUGGCAUACUCACAAGUACUUCU | |
| | CCCGUAGCCACGCCCAUUCCCGGAACCGGAUAUGCGUAUA | |
| | GUCUGCGUCUGACCCCACGGCCUGUGUCCAGAUUCCUGG | |
| | GUAACAAUAGUAUCUUAUACGUGUUUUAUAGCGGAAACG | |
| | GCCCUAAAGCGUCCGGAGGGGACUAUUGUAUUCAGAGUA | |
| | AUAUCGUUUUCUCUGAUGAAAUUCCUGCCAGUCAGGACA | |
| | UGCCGACAAACACAACUGAUAUUACCUACGUGGGCGACA | |
| | AUGCCACGUAUUCAGUGCCCAUGGUCACGAGCGAGGACG | |
| | CCAAUUCACCAAAUGUUACUGUAACAGCUUUCUGGGCCU | |
| | GGCCAAAUAACACUGAGACUGACUUCAAAUGUAAGUGGA | |
| | CUUUGACCUCUGGAACUCCGUCGGGUUGCGAGAAUAUCA | |
| | GCGGGGCCUUUGCUUCCAACAGGACUUUCGACAUCACUG | |
| | UCUCAGGGCUGGGGACAGCACCGAAGACAUUAAUCAUAA | |
| | CACGGACCGCCACCAACGCCACGACUACAACCCAUAAGGU | |
| | GAUCUUUUCCAAGGCACCUGGAUCCGGACUGGUGGUCAA | |
| | CUAUGUGAAUACAAAUAUGGGCCUCAAGAUUAGGCAGCU | |
| | CCUAUGGUUCCAUAUUUCCUGCUUAACUUUCGGUAGGGA | |
| | AACUGUCCUGGAAUAUCUCGUUAGCUUCGGAGUGUGGAU | |
| | UCGGACUCCUCCUGCCUACAGACCACCUAACGCUCCAAUU | |
| | CUGUCAACUCUCCCAGAGACGACUGUGGUCAGAAGGAGG | |
| | GGCAGGAGCCCCAGACGGCGGACACCAAGCCCUCGCCGAA | |
| | GAAGAAGCCAAAGCCCGCGGCGCCGGAGAUCUCAGUCCA | |
| | GAGAGAGCCAGUGC | |
| 3′ UTR | UGAUAAUAGGCUGGAGCCUCGGUGGCCAUGCUUCUUGCC | 3 |
| | CCUUGGGCCUCCCCCCAGCCCCUCCUCCCCUUCCUGCACC | |
| | CGUACCCCCGUGGUCUUUGAAUAAAGUCUGAGUGGGCGG | |
| | C | |
| Corresponding | MDSKGSSQKGSRLLLLLVVSNLLLPQGVVDIDPYKEFGATVE | 92 |
| amino acid | LLSFLPSDFFPSVRDLLDTAAALYREALESPEHCSPHHTALRQ | |
| sequence | AILCWGELMTLATWVGNNLEDPASRDLVVNYVNTNMGLKIR | |
| | QLLWFHISCLTFGRETVLEYLVSFGVWIRTPPAYRPPNAPILST | |
| | LPETTVVGSGSAGSASGGASSGSGGASDIDPYKEFGATVELLS | |
| | FLPSDFFPSVRDLLDTAAALYREALESPEHCSPHHTALRQAILC | |
| | WGELMTLATWVGNNGSGEAALLVCQYTIQSLIHLTGEDPGFF | |
| | NVEIPEFPFYPTCNVCTADVNVTINFDVGGKKHQLDLDFGQLT | |
| | PHTKAVYQPRGAFGGSENATNLFLLELLGAGELALTMRSKKL | |
| | PINVTTGEEQQVSLESVDVYFQDVFGTMWCHHAEMQNPVYLI | |
| | PETVPYIKWDNCNSTNITAVVRAQGLDVTLPLSLPTSAQDSNF | |
| | SVKTEMLGNEIDIECIMEDGEISQVLPGDNKFNITCSGYESHVP | |
| | SGGILTSTSPVATPIPGTGYAYSLRLTPRPVSRFLGNNSILYVFY | |
| | SGNGPKASGGDYCIQSNIVFSDEIPASQDMPTNTTDITYVGDN | |
| | ATYSVPMVTSEDANSPNVTVTAFWAWPNNTETDFKCKWTLT | |
| | SGTPSGCENISGAFASNRTFDITVSGLGTAPKTLIITRTATNATT | |
| | TTHKVIFSKAPGSGLVVNYVNTNMGLKIRQLLWFHISCLTFGR | |
| | ETVLEYLVSFGVWIRTPPAYRPPNAPILSTLPETTVVRRRGRSP | |
| | RRRTPSPRRRRSQSPRRRRSQSRESQC | |
| PolyA tail | 100 nt | |

EBV gp350 Ecto_RX

| SEQ ID NO: 193 consists of from 5′ end to 3′ end: | | 193 |
|---|---|---|
| 5′ UTR SEQ ID NO: 1, mRNA ORF SEQ ID NO: 93, and | | |
| 3′ UTR SEQ ID NO: 3 | | |
| Chemistry | 1-methylpseudouridine | |
| Cap | 7mG(5′)ppp(5′)NlmpNp | |
| 5′ UTR | GGGAAAUAAGAGAGAAAAGAAGAGUAAGAAGAAAUAUA | 1 |
| | AGAGCCACC | |
| ORFofmRNA | AUGGACAGCAAGGGCAGCAGCCAGAAGGGUAGCAGGCUA | 93 |
| Construct | CUCUUGCUCCUAGUGGUGAGCAACUUGCUUCUUCCCCAG | |
| (excluding | GGCGUGGUGGAGGCAGCAUUGCUUGUCUGCCAGUAUACA | |
| the stop | AUCCAGUCGCUCAUUCAUCUAACAGGCGAGGACCCCGGC | |
| codon) | UUCUUUAACGUGGAAAUCCCAGAGUUCCCUUUCUAUCCA | |
| | ACCUGUAACGUUUGCACUGCCGACGUGAACGUGACAAUC | |
| | AAUUUCGACGUGGGAGGAAAGAAGCAUCAGCUUGAUCUG | |
| | GAUUUCGGCCAACUGACGCCACACACCAAAGCGGUGUAC | |
| | CAACCAAGGGGUGCAUUUGGAGGGAGCGAGAAUGCUACA | |
| | AAUCUGUUCUUACUGGAACUGCUUGGUGCAGGAGAGCUG | |
| | GCACUAACCAUGCGAAGCAAGAAGCUCCCCAUCAACGUU | |
| | ACCACCGGGGAAGAACAGCAAGUCAGCCUUGAAUCCGUG | |
| | GAUGUGUACUUUCAGGAUGUUUUCGGCACCAUGUGGUGU | |
| | CACCACGCUGAGAUGCAGAAUCCCGUGUAUCUCAUACCC | |
| | GAGACUGUACCCUACAUCAAGUGGGAUAAUUGCAAUUCA | |
| | ACUAAUAUUACGGCUGUGGUGAGGGCCCAGGGCUUGGAC | |
| | GUGACUCUGCCCUUAUCUCUACCUACUUCUGCCCAAGACU | |
| | CCAAUUUCUCUGUCAAGACCGAGAUGCUCGGGAAUGAGA | |
| | UCGAUAUCGAGUGCAUCAUGGAGGACGGUGAGAUAAGCC | |
| | AGGUUCUGCCCGGCGACAACAAGUUCAAUAUCACUUGUU | |
| | CUGGCUACGAGUCCCAUGUGCCUUCCGGCGGCAUACUCAC | |
| | AAGUACUUCUCCCGUAGCCACGCCCAUUCCCGGAACCGGA | |
| | UACGCCUACAGUCUGCGUCUGACCCCACGGCCUGUGUCCA | |
| | GAUUCCUGGGUAACAAUAGUAUCUUAUACGUGUUUUAUA | |
| | GCGGAAACGGCCCUAAAGCGUCCGGAGGGGACUAUUGUA | |
| | UUCAGAGUAAUAUCGUUUUCUCUGAUGAGAUUCCAGCCA | |
| | GUCAGGACAUGCCGACAAACACAACUGAUAUUACCUACG | |
| | UGGGCGACAAUGCCACGUAUUCAGUGCCCAUGGUCACGA | |
| | GCGAGGACGCCAAUUCACCAAAUGUUACUGUAACAGCUU | |
| | UCUGGGCCUGGCCAAAUAACACUGAGACUGACUUCAAAU | |
| | GUAAGUGGACUUUGACCUCUGGAACUCCGUCGGGUUGCG | |
| | AGAAUAUCAGCGGGGCCUUUGCUUCCAACAGGACUUUCG | |
| | ACAUCACUGUCUCAGGGCUGGGGACAGCACCGAAGACAU | |
| | UAAUCAUAACACGGACCGCCACCAACGCCACGACUACAAC | |
| | CCAUAAGGUGAUCUUUUCCAAGGCACCUGAGUCCACCAC | |
| | UACCUCCCCGACUCUUAACACUACGGGCUUCGCUGAUCCC | |
| | AAUACUACUACUGGGUUGCCUAGCUCGACACAUGUGCCG | |
| | ACGAACCUGACUGCCCCUGCAUCGACCGGGCCCACAGUUU | |
| | CGACCGCCGAUGUGACAAGCCCUACGCCCGCAGGUACAAC | |
| | CUCAGGCGCCAGCCCAGUGACCCCUUCCCCAAGCCCCUGG | |
| | GACAACGGAACGGAGUCCAAGGCUCCUGAUAUGACUUCC | |
| | UCUACCAGCCCCGUGACUACACCCACUCCCAACGCAACUA | |
| | GCCCAACCCCAGCUGUGACGACGCCCACCCCGAACGCGAC | |
| | AUCUCCCACACCUGCUGUGACAACCCCUACCCCUAACGCC | |
| | ACUAGCCCUACCCUAGGUAAGACCAGUCCGACUAGCGCCG | |
| | UUACUACACCGACCCCUAAUGCAACCGGCCCGACUGUCGG | |
| | CGAGACUUCCCCGCAAGCCAAUGCGACAAAUCACACAUU | |
| | GGGCGGGACCUCUCCUACACCAGUCGUUACAUCUCAGCCU | |
| | AAGAACGCUACCUCCGCUGUCACUACCGGCCAGCACAACA | |
| | UCACAAGCUCAAGCACGAGUUCCAUGAGCUUGCGGCCGA | |
| | GCUCAAAUCCCGAGACACUAUCACCAUCCACAUCAGACAA | |
| | CAGUACUUCACACAUGCCACUCUUGACGAGCGCUCACCCC | |
| | ACCGGCGGCGAGAACAUUACCCAGGUGACUCCGGCGUCU | |
| | AUUUCCACCCACCACGUCAGCACGUCGUCUCCCGCACCAC | |
| | GGCCAGGGACGACUUCUCAGGCCAGCGGCCCAGGAAACU | |
| | CCUCUACAAGCACAAAGCCAGGCGAAGUUAACGUCACCA | |
| | AGGGAACGCCUCCCCAGAACGCAACCUCCCCACAGGCUCC | |
| | CAGCGGGCAGAAGACUGCGGUGCCAACUGUGACCAGCAC | |
| | CGGUGGCAAGGCCAACUCAACAACUGGAGGCAAGCAUAC | |
| | GACGGGGCACGGCGCCCGGACCUCCACUGAACCCACGACC | |
| | GAUUACGGAGGUGAUAGUACCACCCCGCGGCCACGAUAU | |
| | AAUGCCACCACUUAUCUGCCACCUAGCACUUCCUCCAAGC | |
| | UCCGGCCACGGUGGACCUUCACAAGCCCACCCGUGACGAC | |
| | AGCCCAGGCGACGGUGCCAGUCCCACCUACAAGCCAGCCA | |
| | CGCUUCUCCAACCUUAGU | |
| 3′ UTR | UGAUAAUAGGCUGGAGCCUCGGUGGCCAUGCUUCUUGCC | 3 |
| | CCUUGGGCCUCCCCCCAGCCCCUCCUCCCCUUCCUGCACC | |
| | CGUACCCCCGUGGUCUUUGAAUAAAGUCUGAGUGGGCGG | |
| | C | |
| Corresponding | MDSKGSSQKGSRLLLLLVVSNLLLPQGVVEAALLVCQYTIQS | 94 |
| amino acid | LIHLTGEDPGFFNVEIPEFPFYPTCNVCTADVNVTINFDVGGKK | |
| sequence | HQLDLDFGQLTPHTKAVYQPRGAFGGSENATNLFLLELLGAG | |
| | ELALTMRSKKLPINVTTGEEQQVSLESVDVYFQDVFGTMWCH | |
| | HAEMQNPVYLIPETVPYIKWDNCNSTNITAVVRAQGLDVTLP | |
| | LSLPTSAQDSNFSVKTEMLGNEIDIECIMEDGEISQVLPGDNKF | |
| | NITCSGYESHVPSGGILTSTSPVATPIPGTGYAYSLRLTPRPVSR | |
| | FLGNNSILYVFYSGNGPKASGGDYCIQSNIVFSDEIPASQDMPT | |
| | NTTDITYVGDNATYSVPMVTSEDANSPNVTVTAFWAWPNNT | |
| | ETDFKCKWTLTSGTPSGCENISGAFASNRTFDITVSGLGTAPKT | |
| | LIITRTATNATTTTHKVIFSKAPESTTTSPTLNTTGFADPNTTTG | |
| | LPSSTHVPTNLTAPASTGPTVSTADVTSPTPAGTTSGASPVTPS | |
| | PSPWDNGTESKAPDMTSSTSPVTTPTPNATSPTPAVTTPTPNAT | |
| | SPTPAVTTPTPNATSPTLGKTSPTSAVTTPTPNATGPTVGETSP | |
| | QANATNHTLGGTSPTPVVTSQPKNATSAVTTGQHNITSSSTSS | |
| | MSLRPSSNPETLSPSTSDNSTSHMPLLTSAHPTGGENITQVTPA | |
| | SISTHHVSTSSPAPRPGTTSQASGPGNSSTSTKPGEVNVTKGTP | |
| | PQNATSPQAPSGQKTAVPTVTSTGGKANSTTGGKHTTGHGAR | |
| | TSTEPTTDYGGDSTTPRPRYNATTYLPPSTSSKLRPRWTFTSPP | |
| | VTTAQATVPVPPTSQPRFSNLS | |
| PolyA tail | 100 nt | |

EBV gL-gH_LS_RX

| SEQ ID NO: 194 consists of from 5′ end to 3′ end: | | 194 |
|---|---|---|
| 5′ UTR SEQ ID NO: 1, mRNA ORF SEQ ID NO: 95, and | | |
| 3′ UTR SEQ ID NO: 3 | | |
| Chemistry | 1-methylpseudouridine | |
| Cap | 7mG(5′)ppp(5′)NlmpNp | |
| 5′ UTR | GGGAAAUAAGAGAGAAAAGAAGAGUAAGAAGAAAUAUA | 1 |
| | AGAGCCACC | |
| ORF of mRNA | AUGGACUCGAAGGGAUCUAGUCAGAAAGGCUCUAGGCUC | 95 |
| Construct | CUACUCCUCUUGGUGGUGAGCAACUUACUCCUUCCCCAG | |
| (excluding | GGCGUGGUGAGAGCAGUGGGCGUUUUCUUAGCAAUCUGC | |
| the stop | CUCGUGACAAUCUUUGUGUUGCCGACCUGGGGCAACUGG | |
| codon) | GCCUACCCCUGCUGCCACGUGACCCAGCUGAGAGCUCAAC | |
| | ACCUGCUUGCCCUGGAGAACAUCAGCGACAUCUACCUUG | |
| | UAAGCAACCAGACAUGCGACGGCUUCAGUCUGGCCAGCC | |
| | UGAACAGCCCCAAGAACGGCUCAAACCAGCUAGUGAUCA | |
| | GCCGGUGCGCUAACGGUCUGAACGUUGUGAGCUUCUUCA | |
| | UCAGCAUCUUGAAGAGAAGUAGUAGCGCGCUGACCGGCC | |
| | ACCUGAGAGAGCUGCUGACCACUCUCGAGACACUCUAUG | |
| | GCAGCUUCAGCGUGGAGGACCUGUUCGGCGCAAACCUGA | |
| | ACCGCUACGCCUGGCACAGAGGCGGCGGAAGCGGUAGCG | |
| | CUGGCAGCGCCAGCGGAGGCGCUUCAUCCGGAUCCGGCG | |
| | GCGCAAGCAGCCUUUCUGAGGUGAAGCUCCACUUGGACA | |
| | UCGAAGGCCACGCCAGCCAUUACACCAUACCAUGGACCGA | |
| | GCUGAUGGCAAAGGUGCCCGGCCUUAGCCCAGAAGCCCU | |
| | GUGGCGAGAGGCCAACGUUACCGAAGACUUGGCUAGUAU | |
| | GUUAAACAGGUACAAACUUAUCUACAAGACUAGCGGCAC | |
| | CCUGGGCAUCGCAUUAGCCGAGCCCGUGGACAUCCCCGCC | |
| | GUUAGCGAGGGCAGCAUGCAGGUGGACGCCAGCAAGGUU | |
| | CACCCUGGUGUAAUUAGUGGCCUCAACAGCCCAGCCUGU | |
| | AUGUUGAGCGCCCCACUGGAGAAGCAGCUGUUUUACUAU | |
| | AUCGGGACCAUGUUGCCCAAUACCCGGCCACACAGUUAC | |
| | GUGUUCUACCAGCUGCGGUGUCACCUGAGCUACGUGGCC | |
| | CUGUCUAUCAACGGCGACAAGUUCCAGUACACCGGCGCC | |
| | AUGACCAGCAAGUUCCUGAUGGGCACCUACAAGCGGGUC | |
| | ACCGAGAAGGGCGACGAGCACGUGCUGUCACUUGUGUUC | |
| | GGUAAGACCAAGGACCUGCCCGACCUUCGGGGCCCCUUU | |
| | UCAUACCCUAGUUUGACCAGCGCCCAAAGUGGCGACUAC | |
| | AGCCUUGUGAUAGUGACCACCUUCGUGCAUUACGCCAAC | |
| | UUCCACAACUACUUCGUGCCCAACCUGAAGGACAUGUUC | |
| | AGCCGGGCGGUAACCAUGACGGCCGCUUCUUAUGCCCGG | |
| | UAUGUGCUGCAGAAGCUGGUCCUGCUGGAGAUGAAGGGC | |
| | GGGUGCCGGGAGCCCGAGUUGGACACCGAAACCCUGACC | |
| | ACCAUGUUCGAGGUUAGCGUGGCCUUCUUCAAGGUGGGU | |
| | CACGCGGUGGGCGAAACCGGCAAUGGAUGCGUGGACUUA | |
| | CGCUGGCUGGCCAAGAGUUUCUUUGAGCUUACCGUGCUG | |
| | AAGGAUAUCAUCGGCAUCUGCUACGGCGCCACCGUAAAG | |
| | GGAAUGCAGAGCUAUGGGCUGGAGAGACUUGCCGCCAUG | |
| | CUCAUGGCUACCGUGAAGAUGGAGGAGCUGGGACACCUG | |
| | ACAACAGAGAAGCAGGAGUACGCCCUGAGACUGGCCACC | |
| | GUGGGCUACCCUAAGGCCGGCGUGUACAGUGGACUCAUA | |
| | GGCGGAGCUACCAGCGUGCUCCUAUCCGCUUAUAACAGA | |
| | CACCCCUUAUUUCAGCCCCUGCACACAGUGAUGCGGGAG | |
| | ACUUUAUUCAUCGGAUCUCACGUCGUACUGCGGGAGUUG | |
| | CGGCUGAACGUAACCACCCAGGGCCCUAAUUUAGCACUU | |
| | UAUCAGCUGCUCAGUACUGCCCUGUGCAGCGCACUUGAG | |
| | AUCGGCGAGGUACUCAGAGGCCUGGCCCUCGGUACGGAG | |
| | AGUGGCCUGUUUUCUCCAUGCUACCUUAGCCUGCGGUUU | |
| | GAUCUGACCAGAGACAAGUUGCUGAGCAUGGCUCCUCAA | |
| | GAGGCGACCCUUGACCAGGCAGCCGUGUCAAACGCCGUG | |
| | GACGGAUUCCUGGGCAGACUGUCUCUGGAACGGGAAGAC | |
| | CGGGAUGCUUGGCACCUUCCUGCCUAUAAGUGUGUGGAU | |
| | CGGCUGGAUAAGGUCCUGAUGAUAAUCCCUCUGAUUAAC | |
| | GUUACUUUCAUCAUCUCUAGCGAUCGGGAGGUCCGAGGG | |
| | UCCGCCCUCUACGAGGCCAGCACCACCUAUCUGAGCAGCA | |
| | GCCUCUUCUUGUCUCCUGUGAUUAUGAACAAGUGCAGCC | |
| | AGGGUGCAGUAGCCGGCGAGCCCCGGCAGAUCCCGAAGA | |
| | GCGGCUUCGCCCUUCUGAGUUACGACGAGAAGGAGGGCC | |
| | UGGAGACUACAACUUACAUCACAAGCCAGGAGGUGCAGA | |
| | ACAGCAUCCUGUCAUCUAAUUACUUUGACUUCGACAACC | |
| | UGCACGUUCAUUAUCUACUGCUAACAACUAACGGUACCG | |
| | UCAUGGAAAUCGCAGGACUGUAUGAGGAGCGGGCCGGCA | |
| | GCGGGAGCGCGGGCUCUGCCAGCGGUGGUGCCAGCAGCG | |
| | GCAGUGGAGGUGCCUCCAUGCAGAUUUACGAAGGAAAGC | |
| | UGACCGCCGAAGGCCUGAGGUUCGGCAUCGUGGCUUCCA | |
| | GAUUCAACCACGCACUGGUGGACAGGCUGGUGGAGGGCG | |
| | CCAUCGACGCAAUCGUGCGCCACGGCGGCAGGGAGGAGG | |
| | ACAUCACCCUCGUAAGAGUCCCUGGUAGCUGGGAAAUUC | |
| | CCGUGGCCGCGGGCGAGCUGGCUAGGAAGGAGGAUAUCG | |
| | ACGCCGUCAUCGCCAUCGGCGUUCUCAUCCGGGGUGCCAC | |
| | ACCACAUUUCGACUACAUCGCAAGCGAGGUUUCAAAGGG | |
| | ACUCGCCGACUUAAGUCUGGAGCUGAGGAAGCCCAUCAC | |
| | CUUUGGCGUGAUCACCGCCGACACCCUGGAGCAGGCCAUC | |
| | GAGCGCGCCGGCACCAAGCACGGGAACAAGGGCUGGGAG | |
| | GCAGCCUUAUCAGCCAUCGAAAUGGCGAAUCUGUUCAAG | |
| | AGCCUGCGG | |
| 3′ UTR | UGAUAAUAGGCUGGAGCCUCGGUGGCCAUGCUUCUUGCC | 3 |
| | CCUUGGGCCUCCCCCCAGCCCCUCCUCCCCUUCCUGCACC | |
| | CGUACCCCCGUGGUCUUUGAAUAAAGUCUGAGUGGGCGG | |
| | C | |
| Corresponding | MDSKGSSQKGSRLLLLLVVSNLLLPQGVVRAVGVFLAICLVTI | 96 |
| amino acid | FVLPTWGNWAYPCCHVTQLRAQHLLALENISDIYLVSNQTCD | |
| sequence | GFSLASLNSPKNGSNQLVISRCANGLNVVSFFISILKRSSSALTG | |
| | HLRELLTTLETLYGSFSVEDLFGANLNRYAWHRGGGSGSAGS | |
| | ASGGASSGSGGASSLSEVKLHLDIEGHASHYTIPWTELMAKVP | |
| | GLSPEALWREANVTEDLASMLNRYKLIYKTSGTLGIALAEPV | |
| | DIPAVSEGSMQVDASKVHPGVISGLNSPACMLSAPLEKQLFYY | |
| | IGTMLPNTRPHSYVFYQLRCHLSYVALSINGDKFQYTGAMTS | |
| | KFLMGTYKRVTEKGDEHVLSLVFGKTKDLPDLRGPFSYPSLT | |
| | SAQSGDYSLVIVTTFVHYANFHNYFVPNLKDMFSRAVTMTAA | |
| | SYARYVLQKLVLLEMKGGCREPELDTETLTTMFEVSVAFFKV | |
| | GHAVGETGNGCVDLRWLAKSFFELTVLKDIIGICYGATVKGM | |
| | QSYGLERLAAMLMATVKMEELGHLTTEKQEYALRLATVGYP | |
| | KAGVYSGLIGGATSVLLSAYNRHPLFQPLHTVMRETLFIGSHV | |
| | VLRELRLNVTTQGPNLALYQLLSTALCSALEIGEVLRGLALGT | |
| | ESGLFSPCYLSLRFDLTRDKLLSMAPQEATLDQAAVSNAVDG | |
| | FLGRLSLEREDRDAWHLPAYKCVDRLDKVLMIIPLINVTFIISS | |
| | DREVRGSALYEASTTYLSSSLFLSPVIMNKCSQGAVAGEPRQI | |
| | PKIQNFTRTQKSCIFCGFALLSYDEKEGLETTTYITSQEVQNSIL | |
| | SSNYFDFDNLHVHYLLLTTNGTVMEIAGLYEERAGSGSAGSA | |
| | SGGASSGSGGASMQIYEGKLTAEGLRFGIVASRFNHALVDRL | |
| | VEGAIDAIVRHGGREEDITLVRVPGSWEIPVAAGELARKEDID | |
| | AVIAIGVLIRGATPHFDYIASEVSKGLADLSLELRKPITFGVITA | |
| | DTLEQAIERAGTKHGNKGWEAALSAIEMANLFKSLR | |
| PolyA tail | 100 nt | |

EBV gBEcto_LS_RX

| SEQ ID NO: 195 consists of from 5′ end to 3′ end: | | 195 |
|---|---|---|
| 5′ UTR SEQ ID NO: 1, mRNA ORF SEQ ID NO: 97, and | | |
| 3′ UTR SEQ ID NO: 3 | | |
| Chemistry | 1-methylpseudouridine | |
| Cap | 7mG(5′)ppp(5′)NlmpNp | |
| 5′ UTR | GGGAAAUAAGAGAGAAAAGAAGAGUAAGAAGAAAUAUA | 1 |
| | AGAGCCACC | |
| ORF of mRNA | AUGGACUCUAAGGGCAGCAGCCAGAAGGGCAGUAGGCUC | 97 |
| Construct | CUACUUCUCCUCGUGGUGAGCAACUUAUUGCUUCCCCAG | |
| (excluding | GGAGUGGUGCAGACUCCGGAACAGCCCGCUCCGCCCGCUA | |
| the stop | CCACCGUCCAGCCUACCGCCACGCGCCAGCAGACUUCCUU | |
| codon) | CCCGUUUCGCGUCUGCGAGCUCUCCUCUCACGGCGAUCUC | |
| | UUCCGCUUCUCCUCCGAUAUUCAGUGCCCCUCCUUCGGCA | |
| | CCCGCGAGAACCAUACCGAGGGCCUCCUCAUGGUCUUUA | |
| | AGGACAACAUCAUCCCUUACUCCUUCAAGGUACGCUCCU | |
| | ACACAAAGAUAGUCACCAACAUCCUCAUCUAUAAUGGAU | |
| | GGUACGCUGACUCUGUUACCAAUCGCCACGAGGAGAAGU | |
| | UCUCCGUUGAUUCCUACGAGACUGACCAGAUGGAUACCA | |
| | UCUACCAGUGCUACAAUGCCGUCAAGAUGACCAAGGACG | |
| | GCCUGACCCGCGUCUAUGUCGACCGCGACGGCGUUAACA | |
| | UAACUGUCAACCUCAAGCCUACAGGCGGCCUGGCCAAUG | |
| | GCGUCAGACGCUACGCCUCCCAGACCGAGCUCUACGACGC | |
| | UCCUGGCUGGCUGAUCUGGACCUACCGGACCCGCACCACU | |
| | GUCAAUUGCCUCAUUACCGACAUGAUGGCCAAGUCCAAU | |
| | AGCCCAUUCGAUUUCUUCGUAACCACCACCGGCCAGACCG | |
| | UCGAGAUGUCGCCAUUCUAUGACGGCAAGAAUAAGGAAA | |
| | CUUUCCACGAGAGAGCCGAUAGCUUCCACGUCCGCACGA | |
| | ACUACAAGAUUGUCGACUACGACAAUCGCGGCACCAAUC | |
| | CACAGGGCGAGCGCCGCGCCUUCCUGGACAAGGGCACCUA | |
| | CACCCUCUCCUGGAAACUCGAGAACAGAACCGCCUACUGU | |
| | CCCCUCCAGCACUGGCAGACUUUUGAUUCCACCAUCGCCA | |
| | CUGAGACUGGCAAGAGUAUCCAUUUCGUCACCGACGAAG | |
| | GAACAUCUUCAUUCGUCACAAAUACCACUGUGGGCAUUG | |
| | AGCUCCCCGACGCCUUCAAGUGCAUCGAGGAACAGGUCA | |
| | ACAAGACAAUGCACGAGAAGUACGAGGCCGUGCAGGACC | |
| | GGUAUACCAAGGGCCAGGAGGCCAUUACAUACUUCAUCA | |
| | CCAGCGGUGGAUUGCUUCUCGCCUGGCUUCCACUCACACC | |
| | UCGCAGUCUGGCCACAGUUAAGAACCUCACUGAGUUGAC | |
| | CACUCCAACAUCGUCACCACCUUCUUCACCUAGCCCUCCU | |
| | GCUCCUUCCGCCGCCCGCGGCUCCACUCCUGCCGCUGUCU | |
| | UAAGGGGCUCGGGCAGCGCCGGCAGCGCAUCGGGAGGGG | |
| | CGAGUUCAGGGUCAGGCGGUGCCUCCGCAGGCAAUGCUA | |
| | CCACACCAGUGCCACCAACCGCCCCUGGCAAGUCCUUAGG | |
| | UACCCUGAACAAUCCAGCGACAGUUCAGAUCCAGUUCGC | |
| | UUACGAUUCACUCAGGCGCCAGAUCAACCGCAUGCUUGG | |
| | UGACCUUGCCCGGGCCUGGUGCCUCGAACAGAAGCGCCA | |
| | GAACAUGGUACUUAGGGAACUUACCAAGAUUAAUCCUAC | |
| | UACAGUCAUGUCCUCUAUCUACGGCAAGGCCGUUGCUGC | |
| | CAAGCGCCUGGGCGACGUCAUCAGCGUGUCGCAGUGCGU | |
| | CCCAGUCAACCAGGCUACCGUUACCCUCAGGAAGUCCAUG | |
| | AGAGUGCCAGGCUCCGAAACAAUGUGCUAUUCCCGCCCU | |
| | CUGGUUUCAUUUUCCUUCAUCAACGACACAAAGACCUAC | |
| | GAGGGCCAGUUAGGAACUGACAAUGAGAUAUUCUUGACU | |
| | AAGAAGAUGACUGAGGUAUGCCAGGCAACUUCUCAAUAC | |
| | UACUUCCAGUCUGGAAAUGAAAUCCACGUAUAUAACGAC | |
| | UAUCAUCACUUUAAGACUAUCGAACUCGACGGAAUUGCU | |
| | ACACUCCAAACAUUCAUCUCACUGAAUACCUCCCUUAUCG | |
| | AGAACAUCGACUUCGCAUCCCUCGAGCUGUAUAGCAGAG | |
| | ACGAGCAGAGAGCCAGCAACGUGUUCGACCUGGAGGGUA | |
| | UCUUUCGCGAGUACAACUUCCAGGCACAGAAUAUAGCCG | |
| | GCCUCCGUAAGGACCUGGAUAACGCCGUGUCCAAUGGCC | |
| | GCAACCAGUUCGUCGACGGUCUUGGCGAACUCAUGGACU | |
| | CUCUGGGAUCCGUGGGGCAAUCCAUCACAAACUUAGUCU | |
| | CUACUGUCGGUGGACUAUUCAGCAGCCUGGUUAGCGGAU | |
| | UUAUCUCUUUCUUUAAGAACCCAGGCAGUGGUUCUGCCG | |
| | GCUCAGCCAGCGGCGGCGCUAGUAGCGGCAGCGGAGGCG | |
| | CCUCAAUGCAGAUCUAUGAGGGUAAGUUGACAGCCGAAG | |
| | GCUUGAGGUUUGGCAUCGUAGCCAGCCGGUUCAACCACG | |
| | CCCUGGUGGACAGGCUGGUUGAGGGUGCCAUUGACGCCA | |
| | UUGUGAGGCACGGCGGCAGGGAGGAGGACAUUACCCUGG | |
| | UCAGAGUCCCCGGAUCAUGGGAGAUCCCCGUGGCCGCCG | |
| | GGGAGCUGGCCAGGAAGGAAGACAUCGACGCUGUGAUCG | |
| | CCAUCGGCGUGCUGAUCCGAGGAGCCACACCCCAUUUCGA | |
| | CUACAUCGCCAGUGAGGUUAGCAAAGGCCUAGCGGACCU | |
| | GAGCCUGGAGCUGCGCAAGCCCAUCACCUUCGGCGUCAU | |
| | UACUGCCGACACCUUGGAACAGGCCAUCGAAAGGGCCGG | |
| | UACAAAGCACGGCAACAAGGGCUGGGAGGCAGCCCUUAG | |
| | CGCCAUCGAGAUGGCAAACCUGUUUAAGUCCUUGAGG | |
| 3′UTR | UGAUAAUAGGCUGGAGCCUCGGUGGCCAUGCUUCUUGCC | 3 |
| | CCUUGGGCCUCCCCCCAGCCCCUCCUCCCCUUCCUGCACC | |
| | CGUACCCCCGUGGUCUUUGAAUAAAGUCUGAGUGGGCGG | |
| | C | |
| Corresponding | MDSKGSSQKGSRLLLLLVVSNLLLPQGVVQTPEQPAPPATTV | 98 |
| amino acid | QPTATRQQTSFPFRVCELSSHGDLFRFSSDIQCPSFGTRENHTE | |
| sequence | GLLMVFKDNIIPYSFKVRSYTKIVTNILIYNGWYADSVTNRHE | |
| | EKFSVDSYETDQMDTIYQCYNAVKMTKDGLTRVYVDRDGV | |
| | NITVNLKPTGGLANGVRRYASQTELYDAPGWLIWTYRTRTTV | |
| | NCLITDMMAKSNSPFDFFVTTTGQTVEMSPFYDGKNKETFHE | |
| | RADSFHVRTNYKIVDYDNRGTNPQGERRAFLDKGTYTLSWK | |
| | LENRTAYCPLQHWQTFDSTIATETGKSIHFVTDEGTSSFVTNT | |
| | TVGIELPDAFKCIEEQVNKTMHEKYEAVQDRYTKGQEAITYFI | |
| | TSGGLLLAWLPLTPRSLATVKNLTELTTPTSSPPSSPSPPAPSAA | |
| | RGSTPAAVLRGSGSAGSASGGASSGSGGASAGNATTPVPPTAP | |
| | GKSLGTLNNPATVQIQFAYDSLRRQINRMLGDLARAWCLEQK | |
| | RQNMVLRELTKINPTTVMSSIYGKAVAAKRLGDVISVSQCVP | |
| | VNQATVTLRKSMRVPGSETMCYSRPLVSFSFINDTKTYEGQL | |
| | GTDNEIFLTKKMTEVCQATSQYYFQSGNEIHVYNDYHHFKTIE | |
| | LDGIATLQTFISLNTSLIENIDFASLELYSRDEQRASNVFDLEGI | |
| | FREYNFQAQNIAGLRKDLDNAVSNGRNQFVDGLGELMDSLG | |
| | SVGQSITNLVSTVGGLFSSLVSGFISFFKNPGSGSAGSASGGAS | |
| | SGSGGASMQIYEGKLTAEGLRFGIVASRFNHALVDRLVEGAID | |
| | AIVRHGGREEDITLVRVPGSWEIPVAAGELARKEDIDAVIAIGV | |
| | LIRGATPHFDYIASEVSKGLADLSLELRKPITFGVITADTLEQAI | |
| | ERAGTKHGNKGWEAALSAIEMANLFKSLR | |
| PolyA tail | 100 nt | |

EBV gp350 A44Y V10 Stab

| SEQ ID NO: 196 consists of from 5′ end to 3′ end: | | 196 |
|---|---|---|
| 5′ UTR SEQ ID NO: 1, mRNA ORF SEQ ID NO: 99, and | | |
| 3′ UTR SEQ ID NO: 3 | | |
| Chemistry | 1-methylpseudouridine | |
| Cap | 7mG(5′)ppp(5′)NlmpNp | |
| 5′ UTR | GGGAAAUAAGAGAGAAAAGAAGAGUAAGAAGAAAUAUA | 1 |
| | AGAGCCACC | |
| ORF of mRNA | AUGGAGGCAGCACUGCUGGUCUGCCAGUAUACAAUCCAG | 99 |
| Construct | UCGCUCAUUCAUCUGACAGGCGAGGACCCCGGCUUCUUU | |
| (excluding | AACGUGGAAAUCCCAGAGUUCCCUUUCUAUCCAACCUGU | |
| the stop | AACGUUUGCACUUACGACGUGAACGUGACAAUCAAUUUC | |
| codon) | GACGUGGGAGGAAAGAAGCAUCAGCUUGAUCUGGAUUUC | |
| | GGCCAACUGACGCCACACACCAAAGCGGUGUACCAACCAA | |
| | GGGGUGCAUUUGGAGGGAGCGAGAAUGCUACAAAUCUGU | |
| | UCUUACUGGAACUGCUUGGUGCAGGAGAGCUGGCACUAA | |
| | CCAUGCGAAGCAAGAAGCUCCCCAUCAACGUUACCACCGG | |
| | GGAAGAACAGCAAGUCAGCCUUGAAUCCGUGGAUGUGUA | |
| | CUUUCAGGAUGUUUUCGGCACCAUGUGGUGUCACCACGC | |
| | UGAGAUGCAGAAUCCCGUGUAUCUCAUACCCGAGACUGU | |
| | ACCCUACAUCAAGUGGGAUAAUUGCAAUUCAACUAAUAU | |
| | UACGGCUGUGGUGAGGGCCCAGGGCUUGGACGUGACUCU | |
| | GCCCUUAUCUCUACCUACUUCUGCCCAAGACUCCAAUUUC | |
| | UCUGUCAAGACCGAGAUGCUCGGGAAUGAGAUCGAUAUC | |
| | GAGUGCAUCAUGGAGGACGGUGAGAUAAGCCAGGUUCUG | |
| | CCCGGCGACAACAAGUUCAAUAUCACUUGUUCUGGCUAC | |
| | GAGUCCCAUGUGCCUAGUGGUGGCAUACUCACAAGUACU | |
| | UCUCCCGUAGCCACGCCCAUUCCCGGAACCGGAUACGCCU | |
| | ACAGUCUGCGUCUGACCCCACGGCCUGUGUCCAGAUUCCU | |
| | GGGUAACAAUAGUAUCUUAUACGUGUUUUAUAGCGGAAA | |
| | CGGCCCUAAAGCGUCCGGAGGGGACUAUUGUAUUCAGAG | |
| | UAAUAUCGUUUUCUCUGAUGAGAUUCCUGCCAGUCAGGA | |
| | CAUGCCGACAAACACAACUGAUAUUACCUACGUGGGCGA | |
| | CAAUGCCACGUAUUCAGUGCCCAUGGUCACGAGCGAGGA | |
| | CGCCAAUUCACCAAAUGUUACUGUAACAGCUUUCUGGGC | |
| | CUGGCCAAAUAACACUGAGACUGACUUCAAAUGUAAGUG | |
| | GACUUUGACCUCUGGAACUCCGUCGGGUUGCGAGAAUAU | |
| | CAGCGGGGCCUUUGCUUCCAACAGGACUUUCGACAUCAC | |
| | UGUCUCAGGGCUGGGGACAGCACCGAAGACAUUAAUCAU | |
| | AACACGGACCGCCACCAACGCCACGACUACAACCCAUAAG | |
| | GUGAUCUUUUCCAAGGCACCUGAGUCCACCACUACCUCCC | |
| | CGACUCUUAACACUACGGGCUUCGCUGAUCCCAACACCAC | |
| | UACGGGGUUGCCUAGCUCGACACAUGUGCCGACGAACCU | |
| | GACUGCCCCUGCAUCGACCGGGCCCACAGUUUCGACCGCC | |
| | GAUGUGACAUCACCAACGCCCGCAGGUACAACCUCAGGC | |
| | GCCAGCCCAGUGACCCCUUCCCCAAGCCCCUGGGAUAAUG | |
| | GAACGGAGUCCAAGGCUCCUGAUAUGACUUCCUCUACCA | |
| | GCCCCGUGACUACACCCACUCCCAACGCAACUAGCCCAAC | |
| | CCCAGCUGUGACGACGCCCACCCCGAACGCGACAUCUCCC | |
| | ACACCUGCUGUGACAACCCCAACCCCUAACGCCACUAGCC | |
| | CUACCCUAGGUAAGACCAGUCCGACUAGCGCCGUUACAA | |
| | CCCCUACCCCUAACGCAACCGGCCCGACCGUGGGCGAGAC | |
| | UUCCCCGCAAGCCAAUGCGACAAAUCACACAUUGGGCGG | |
| | GACCUCUCCUACACCAGUCGUUACAUCUCAGCCUAAGAAC | |
| | GCUACCUCCGCUGUCACUACCGGACAGCACAACAUCACCA | |
| | GCUCAAGCACGAGUUCCAUGAGCUUGCGGCCGAGCUCAA | |
| | AUCCCGAGACCCUAUCACCAUCCACAUCAGACAACAGUAC | |
| | UUCACACAUGCCACUCUUGACGAGCGCUCACCCCACCGGC | |
| | GGCGAGAACAUCACCCAGGUGACUCCGGCGUCUAUUUCC | |
| | ACCCACCACGUCAGCACGUCGUCUCCCGCACCGAGACCAG | |
| | GGACGACUUCUCAGGCCAGUGGGCCUGGCAACUCCUCUA | |
| | CAAGCACAAAGCCAGGCGAAGUUAACGUGACAAAGGGAA | |
| | CGCCUCCCCAGAACGCAACCAGUCCUCAGGCGCCCAGCGG | |
| | GCAGAAGACUGCGGUGCCAACUGUGACCAGCACCGGUGG | |
| | CAAGGCCAACUCAACAACUGGAGGCAAGCAUACGACGGG | |
| | GCACGGCGCCCGGACCUCCACUGAACCCACGACCGAUUAC | |
| | GGAGGUGACAGCACAACACCGCGGCCACGAUAUAAUGCC | |
| | ACCACUUAUCUGCCACCAUCCACAAGCUCCAAGCUGCGGC | |
| | CACGGUGGACCUUCACAAGCCCACCCGUGACGACUGCCCA | |
| | AGCGACGGUGCCAGUGCCACCUACAAGCCAGCCACGCUUC | |
| | UCCAACCUUAGUAUGCUCGUUCUCCAGUGGGCCAGCCUU | |
| | GCUGUUCUGACCCUCCUCCUGCUGCUCGUGAUGGCCGAU | |
| | UGCGCCUUUAGGAGAAACCUCAGCACUAGCCACACGUAC | |
| | ACCACGCCGCCCUACGAUGACGCCGAGACUUACGUC | |
| 3′ UTR | UGAUAAUAGGCUGGAGCCUCGGUGGCCAUGCUUCUUGCC | 3 |
| | CCUUGGGCCUCCCCCCAGCCCCUCCUCCCCUUCCUGCACC | |
| | CGUACCCCCGUGGUCUUUGAAUAAAGUCUGAGUGGGCGG | |
| | C | |
| Corresponding | MEAALLVCQYTIQSLIHLTGEDPGFFNVEIPEFPFYPTCNVCTY | 45 |
| amino acid | DVNVTINFDVGGKKHQLDLDFGQLTPHTKAVYQPRGAFGGS | |
| sequence | ENATNLFLLELLGAGELALTMRSKKLPINVTTGEEQQVSLESV | |
| | DVYFQDVFGTMWCHHAEMQNPVYLIPETVPYIKWDNCNSTN | |
| | ITAVVRAQGLDVTLPLSLPTSAQDSNFSVKTEMLGNEIDIECIM | |
| | EDGEISQVLPGDNKFNITCSGYESHVPSGGILTSTSPVATPIPGT | |
| | GYAYSLRLTPRPVSRFLGNNSILYVFYSGNGPKASGGDYCIQS | |
| | NIVFSDEIPASQDMPTNTTDITYVGDNATYSVPMVTSEDANSP | |
| | NVTVTAFWAWPNNTETDFKCKWTLTSGTPSGCENISGAFASN | |
| | RTFDITVSGLGTAPKTLIITRTATNATTTTHKVIFSKAPESTTTS | |
| | PTLNTTGFADPNTTTGLPSSTHVPTNLTAPASTGPTVSTADVTS | |
| | PTPAGTTSGASPVTPSPSPWDNGTESKAPDMTSSTSPVTTPTPN | |
| | ATSPTPAVTTPTPNATSPTPAVTTPTPNATSPTLGKTSPTSAVT | |
| | TPTPNATGPTVGETSPQANATNHTLGGTSPTPVVTSQPKNATS | |
| | AVTTGQHNITSSSTSSMSLRPSSNPETLSPSTSDNSTSHMPLLTS | |
| | AHPTGGENITQVTPASISTHHVSTSSPAPRPGTTSQASGPGNSS | |
| | TSTKPGEVNVTKGTPPQNATSPQAPSGQKTAVPTVTSTGGKA | |
| | NSTTGGKHTTGHGARTSTEPTTDYGGDSTTPRPRYNATTYLPP | |
| | STSSKLRPRWTFTSPPVTTAQATVPVPPTSQPRFSNLSMLVLQ | |
| | WASLAVLTLLLLLVMADCAFRRNLSTSHTYTTPPYDDAETYV | |
| PolyA tail | 100 nt | |

EBV gp350 V15 Stab4_NGM6

| SEQ ID NO: 197 consists of from 5′ end to 3′ end: | | 197 |
|---|---|---|
| 5′ UTR SEQ ID NO: 1, mRNA ORF SEQ ID NO: 100, and | | |
| 3′ UTR SEQ ID NO: 3 | | |
| Chemistry | 1-methylpseudouridine | |
| Cap | 7mG(5′)ppp(5′)NlmpNp | |
| 5′UTR | GGGAAAUAAGAGAGAAAAGAAGAGUAAGAAGAAAUAUA | 1 |
| | AGAGCCACC | |
| ORF of mRNA | AUGGAGGCAGCACUGCUGGUCUGCCAGUAUACAAUCCAG | 100 |
| Construct | UCGCUCAUUCAUCUGACAGGCGAGGACCCCGGCUUCUUU | |
| (excluding | AACGUGGAAAUCCCAGAGUUCCCUUUCUAUCCAACCUGU | |
| the stop | AACGUUUGCACUUACGACGUGAACGUGACAUUCAAUUUC | |
| codon) | GACGUGGGAGGAAAGAAGCAUCAGCUUGAUCUGGAUUUC | |
| | GGCCAACUGACGCCACACACCAAAGCGGUGUACCAACCAA | |
| | GGGGUGCAUUUGGAGGGAGCGAGAAUGCUGCGAAUCUGU | |
| | UCUUACUGGAACUGCUUGGUGCAGGAGAGCUGGCACUAA | |
| | CCAUGCGAAGCAAGAAGCUCCCCAUCAACGUUACCACCGG | |
| | GGAAGAACAGCAAGUCAGCCUUGAAUCCGUGGAUGUGUA | |
| | CUUUCAGGAUGUUUUCGGCACCAUGUGGUGUCACCACGC | |
| | UGAGAUGCAGAAUCCCGUGUAUCUCAUACCCGAGACUGU | |
| | ACCCUACAUCAAGUGGGAUAAUUGCAAUUCAGCGAAUAU | |
| | UACGGCUGUGGUGAGGGCCCAGGGCUUGGACGUGACUCU | |
| | GCCCUUAUCUCUACCUACUUCUGCCCAAGACUCCAAUUUC | |
| | GCGGUCAAGACCGAGAUACUCGGGAAUGAGAUCGAUAUC | |
| | GAGUGCAUCAUGGAGGACGGUGAGAUAAGCCAGGUUCUG | |
| | CCCGGCGACAACAAGUUCAAUAUCGCGUGUUCUGGCUAC | |
| | GAGUCCCAUGUGCCUAGUGGUGGCAUACUCACAAGUACU | |
| | UCUCCCGUAGCCACGCCCAUUCCCGGAACCGGAUACGCCU | |
| | ACAGUCUGCGUCUGACCCCACGGCCUGUGUCCAGAUUCCU | |
| | GGGUAACAAUAGUAUCUUAUACGUGUUUUAUAGCGGAAA | |
| | CGGCCCUAAAGCGUCCGGAGGGGACUAUUGUAUUCAGAG | |
| | UAAUAUCGUUUUCUCUGAUGAGAUUCCUGCCAGUCAGGA | |
| | CAUGCCGACAAACACAACUGAUAUUACCUACGUGGGCGA | |
| | CAAUGCCACGUAUUCAGUGCCCAUGGUCACGAGCGAGGA | |
| | CGCCAAUUCACCAAAUGUUGCGGUAACAGCUUUCUGGGC | |
| | CUGGCCAAAUAACACUGAGACUGACUUCAAAUGUAAGUG | |
| | GACUUUGACCUCUGGAACUCCGUCGGGUUGCGAGAAUAU | |
| | CAGCGGGGCCUUUGCUUCCAACAGGACUUUCGACAUCAC | |
| | UGUCUCAGGGCUGGGGACAGCACCGAAGACAUUAAUCAU | |
| | AACACGGACCGCCACCAACGCCGCGACUACAACCCAUAAG | |
| | GUGAUCUUUUCCAAGGCACCUGAGUCCACCACUACCUCCC | |
| | CGACUCUUAACACUACGGGCUUCGCUGAUCCCAACACCAC | |
| | UACGGGGUUGCCUAGCUCGACACAUGUGCCGACGAACCU | |
| | GACUGCCCCUGCAUCGACCGGGCCCACAGUUUCGACCUGG | |
| | GAUGUGACAUCACCAACGCCCGCAGGUACAACCUCAGGC | |
| | GCCAGCCCAGUGACCCCUUCCCCAAGCCCCUGGGAUAAUG | |
| | GAACGGAGUCCAAGGCUCCUGAUAUGACUUCCUCUACCA | |
| | GCCCCGUGACUACACCCACUCCCAACGCAACUAGCCCAAC | |
| | CCCAGCUGUGACGACGCCCACCCCGAACGCGACAUCUCCC | |
| | ACACCUGCUGUGACAACCCCAACCCCUAACGCCACUAGCC | |
| | CUACCCUAGGUAAGACCAGUCCGACUAGCGCCGUUACAA | |
| | CCCCUACCCCUAACGCAACCGGCCCGACCGUGGGCGAGAC | |
| | UUCCCCGCAAGCCAAUGCGACAAAUCACACAUUGGGCGG | |
| | GACCUCUCCUACACCAGUCGUUACAUCUCAGCCUAAGAAC | |
| | GCUACCUCCGCUGUCACUACCGGACAGCACAACAUCACCA | |
| | GCUCAAGCACGAGUUCCAUGAGCUUGCGGCCGAGCUCAA | |
| | AUCCCGAGACCCUAUCACCAUCCACAUCAGACAACAGUAC | |
| | UUCACACAUGCCACUCUUGACGAGCGCUCACCCCACCGGC | |
| | GGCGAGAACAUCACCCAGGUGACUCCGGCGUCUAUUUCC | |
| | ACCCACCACGUCAGCACGUCGUCUCCCGCACCGAGACCAG | |
| | GGACGACUUCUCAGGCCAGUGGGCCUGGCAACUCCUCUA | |
| | CAAGCACAAAGCCAGGCGAAGUUAACGUGACAAAGGGAA | |
| | CGCCUCCCCAGAACGCAACCAGUCCUCAGGCGCCCAGCGG | |
| | GCAGAAGACUGCGGUGCCAACUGUGACCAGCACCGGUGG | |
| | CAAGGCCAACUCAACAACUGGAGGCAAGCAUACGACGGG | |
| | GCACGGCGCCCGGACCUCCACUGAACCCACGACCGAUUAC | |
| | GGAGGUGACAGCACAACACCGCGGCCACGAUAUAAUGCC | |
| | ACCACUUAUCUGCCACCAUCCACAAGCUCCAAGCUGCGGC | |
| | CACGGUGGACCUUCACAAGCCCACCCGUGACGACUGCCCA | |
| | AGCGACGGUGCCAGUGCCACCUACAAGCCAGCCACGCUUC | |
| | UCCAACCUUAGUAUGCUCGUUCUCCAGUGGGCCAGCCUU | |
| | GCUGUUCUGACCCUCCUCCUGCUGCUCGUGAUGGCCGAU | |
| | UGCGCCUUUAGGAGAAACCUCAGCACUAGCCACACGUAC | |
| | ACCACGCCGCCCUACGAUGACGCCGAGACUUACGUC | |
| 3′ UTR | UGAUAAUAGGCUGGAGCCUCGGUGGCCAUGCUUCUUGCC | 3 |
| | CCUUGGGCCUCCCCCCAGCCCCUCCUCCCCUUCCUGCACC | |
| | CGUACCCCCGUGGUCUUUGAAUAAAGUCUGAGUGGGCGG | |
| | C | |
| Corresponding | MEAALLVCQYTIQSLIHLTGEDPGFFNVEIPEFPFYPTCNVCTY | 55 |
| amino acid | DVNVTFNFDVGGKKHQLDLDFGQLTPHTKAVYQPRGAFGGS | |
| sequence | ENAANLFLLELLGAGELALTMRSKKLPINVTTGEEQQVSLESV | |
| | DVYFQDVFGTMWCHHAEMQNPVYLIPETVPYIKWDNCNSAN | |
| | ITAVVRAQGLDVTLPLSLPTSAQDSNFAVKTEILGNEIDIECIM | |
| | EDGEISQVLPGDNKFNIACSGYESHVPSGGILTSTSPVATPIPGT | |
| | GYAYSLRLTPRPVSRFLGNNSILYVFYSGNGPKASGGDYCIQS | |
| | NIVFSDEIPASQDMPTNTTDITYVGDNATYSVPMVTSEDANSP | |
| | NVAVTAFWAWPNNTETDFKCKWTLTSGTPSGCENISGAFASN | |
| | RTFDITVSGLGTAPKTLIITRTATNAATTTHKVIFSKAPESTTTS | |
| | PTLNTTGFADPNTTTGLPSSTHVPTNLTAPASTGPTVSTWDVT | |
| | SPTPAGTTSGASPVTPSPSPWDNGTESKAPDMTSSTSPVTTPTP | |
| | NATSPTPAVTTPTPNATSPTPAVTTPTPNATSPTLGKTSPTSAV | |
| | TTPTPNATGPTVGETSPQANATNHTLGGTSPTPVVTSQPKNAT | |
| | SAVTTGQHNITSSSTSSMSLRPSSNPETLSPSTSDNSTSHMPLLT | |
| | SAHPTGGENITQVTPASISTHHVSTSSPAPRPGTTSQASGPGNS | |
| | STSTKPGEVNVTKGTPPQNATSPQAPSGQKTAVPTVTSTGGK | |
| | ANSTTGGKHTTGHGARTSTEPTTDYGGDSTTPRPRYNATTYL | |
| | PPSTSSKLRPRWTFTSPPVTTAQATVPVPPTSQPRFSNLSMLVL | |
| | QWASLAVLTLLLLLVMADCAFRRNLSTSHTYTTPPYDDAETY | |
| | V | |
| PolyA tail | 100 nt | |

V6_NGM N195_EBV_gp350_001

| SEQ ID NO: 198 consists of from 5′ end to 3′ end: | | 198 |
|---|---|---|
| 5′ UTR SEQ ID NO: 1, mRNA ORF SEQ ID NO: 101, and | | |
| 3′ UTR SEQ ID NO: 3 | | |
| Chemistry | 1-methylpseudouridine | |
| Cap | 7mG(5′)ppp(5′)NlmpNp | |
| 5′ UTR | GGGAAAUAAGAGAGAAAAGAAGAGUAAGAAGAAAUAUA | 1 |
| | AGAGCCACC | |
| ORF of mRNA | AUGGAGGCAGCACUGCUGGUCUGCCAGUAUACAAUCCAG | 101 |
| Construct | UCGCUCAUUCAUCUGACAGGCGAGGACCCCGGCUUCUUU | |
| (excluding | AACGUGGAAAUCCCAGAGUUCCCUUUCUAUCCAACCUGU | |
| the stop | AACGUUUGCACUGCUGACGUGAACGUGACAAUCAAUUUC | |
| codon) | GACGUGGGAGGAAAGAAGCAUCAGCUUGAUCUGGAUUUC | |
| | GGCCAACUGACGCCACACACCAAAGCGGUGUACCAACCAA | |
| | GGGGUGCAUUUGGAGGGAGCGAGAAUGCUACAAAUCUGU | |
| | UCUUACUGGAACUGCUUGGUGCAGGAGAGCUGGCACUAA | |
| | CCAUGCGAAGCAAGAAGCUCCCCAUCAACGUUACCACCGG | |
| | GGAAGAACAGCAAGUCAGCCUUGAAUCCGUGGAUGUGUA | |
| | CUUUCAGGAUGUUUUCGGCACCAUGUGGUGUCACCACGC | |
| | UGAGAUGCAGAAUCCCGUGUAUCUCAUACCCGAGACUGU | |
| | ACCCUACAUCAAGUGGGAUAAUUGCAAUUCAACUAAUAU | |
| | UACGGCUGUGGUGAGGGCCCAGGGCUUGGACGUGACUCU | |
| | GCCCUUAUCUCUACCUACUUCUGCCCAAGACUCCAAUUUC | |
| | GCGGUCAAGACCGAGAUGCUCGGGAAUGAGAUCGAUAUC | |
| | GAGUGCAUCAUGGAGGACGGUGAGAUAAGCCAGGUUCUG | |
| | CCCGGCGACAACAAGUUCAAUAUCACUUGUUCUGGCUAC | |
| | GAGUCCCAUGUGCCUAGUGGUGGCAUACUCACAAGUACU | |
| | UCUCCCGUAGCCACGCCCAUUCCCGGAACCGGAUACGCCU | |
| | ACAGUCUGCGUCUGACCCCACGGCCUGUGUCCAGAUUCCU | |
| | GGGUAACAAUAGUAUCUUAUACGUGUUUUAUAGCGGAAA | |
| | CGGCCCUAAAGCGUCCGGAGGGGACUAUUGUAUUCAGAG | |
| | UAAUAUCGUUUUCUCUGAUGAGAUUCCUGCCAGUCAGGA | |
| | CAUGCCGACAAACACAACUGAUAUUACCUACGUGGGCGA | |
| | CAAUGCCACGUAUUCAGUGCCCAUGGUCACGAGCGAGGA | |
| | CGCCAAUUCACCAAAUGUUACUGUAACAGCUUUCUGGGC | |
| | CUGGCCAAAUAACACUGAGACUGACUUCAAAUGUAAGUG | |
| | GACUUUGACCUCUGGAACUCCGUCGGGUUGCGAGAAUAU | |
| | CAGCGGGGCCUUUGCUUCCAACAGGACUUUCGACAUCAC | |
| | UGUCUCAGGGCUGGGGACAGCACCGAAGACAUUAAUCAU | |
| | AACACGGACCGCCACCAACGCCACGACUACAACCCAUAAG | |
| | GUGAUCUUUUCCAAGGCACCUGAGUCCACCACUACCUCCC | |
| | CGACUCUUAACACUACGGGCUUCGCUGAUCCCAACACCAC | |
| | UACGGGGUUGCCUAGCUCGACACAUGUGCCGACGAACCU | |
| | GACUGCCCCUGCAUCGACCGGGCCCACAGUUUCGACCGCC | |
| | GAUGUGACAUCACCAACGCCCGCAGGUACAACCUCAGGC | |
| | GCCAGCCCAGUGACCCCUUCCCCAAGCCCCUGGGAUAAUG | |
| | GAACGGAGUCCAAGGCUCCUGAUAUGACUUCCUCUACCA | |
| | GCCCCGUGACUACACCCACUCCCAACGCAACUAGCCCAAC | |
| | CCCAGCUGUGACGACGCCCACCCCGAACGCGACAUCUCCC | |
| | ACACCUGCUGUGACAACCCCAACCCCUAACGCCACUAGCC | |
| | CUACCCUAGGUAAGACCAGUCCGACUAGCGCCGUUACAA | |
| | CCCCUACCCCUAACGCAACCGGCCCGACCGUGGGCGAGAC | |
| | UUCCCCGCAAGCCAAUGCGACAAAUCACACAUUGGGCGG | |
| | GACCUCUCCUACACCAGUCGUUACAUCUCAGCCUAAGAAC | |
| | GCUACCUCCGCUGUCACUACCGGACAGCACAACAUCACCA | |
| | GCUCAAGCACGAGUUCCAUGAGCUUGCGGCCGAGCUCAA | |
| | AUCCCGAGACCCUAUCACCAUCCACAUCAGACAACAGUAC | |
| | UUCACACAUGCCACUCUUGACGAGCGCUCACCCCACCGGC | |
| | GGCGAGAACAUCACCCAGGUGACUCCGGCGUCUAUUUCC | |
| | ACCCACCACGUCAGCACGUCGUCUCCCGCACCGAGACCAG | |
| | GGACGACUUCUCAGGCCAGUGGGCCUGGCAACUCCUCUA | |
| | CAAGCACAAAGCCAGGCGAAGUUAACGUGACAAAGGGAA | |
| | CGCCUCCCCAGAACGCAACCAGUCCUCAGGCGCCCAGCGG | |
| | GCAGAAGACUGCGGUGCCAACUGUGACCAGCACCGGUGG | |
| | CAAGGCCAACUCAACAACUGGAGGCAAGCAUACGACGGG | |
| | GCACGGCGCCCGGACCUCCACUGAACCCACGACCGAUUAC | |
| | GGAGGUGACAGCACAACACCGCGGCCACGAUAUAAUGCC | |
| | ACCACUUAUCUGCCACCAUCCACAAGCUCCAAGCUGCGGC | |
| | CACGGUGGACCUUCACAAGCCCACCCGUGACGACUGCCCA | |
| | AGCGACGGUGCCAGUGCCACCUACAAGCCAGCCACGCUUC | |
| | UCCAACCUUAGUAUGCUCGUUCUCCAGUGGGCCAGCCUU | |
| | GCUGUUCUGACCCUCCUCCUGCUGCUCGUGAUGGCCGAU | |
| | UGCGCCUUUAGGAGAAACCUCAGCACUAGCCACACGUAC | |
| | ACCACGCCGCCCUACGAUGACGCCGAGACUUACGUC | |
| 3′UTR | UGAUAAUAGGCUGGAGCCUCGGUGGCCAUGCUUCUUGCC | 3 |
| | CCUUGGGCCUCCCCCCAGCCCCUCCUCCCCUUCCUGCACC | |
| | CGUACCCCCGUGGUCUUUGAAUAAAGUCUGAGUGGGCGG | |
| | C | |
| Corresponding | MEAALLVCQYTIQSLIHLTGEDPGFFNVEIPEFPFYPTCNVCTA | 65 |
| amino acid | DVNVTINFDVGGKKHQLDLDFGQLTPHTKAVYQPRGAFGGS | |
| sequence | ENATNLFLLELLGAGELALTMRSKKLPINVTTGEEQQVSLESV | |
| | DVYFQDVFGTMWCHHAEMQNPVYLIPETVPYIKWDNCNSTN | |
| | ITAVVRAQGLDVTLPLSLPTSAQDSNFAVKTEMLGNEIDIECI | |
| | MEDGEISQVLPGDNKFNITCSGYESHVPSGGILTSTSPVATPIPG | |
| | TGYAYSLRLTPRPVSRFLGNNSILYVFYSGNGPKASGGDYCIQ | |
| | SNIVFSDEIPASQDMPTNTTDITYVGDNATYSVPMVTSEDANS | |
| | PNVTVTAFWAWPNNTETDFKCKWTLTSGTPSGCENISGAFAS | |
| | NRTFDITVSGLGTAPKTLIITRTATNATTTTHKVIFSKAPESTTT | |
| | SPTLNTTGFADPNTTTGLPSSTHVPTNLTAPASTGPTVSTADVT | |
| | SPTPAGTTSGASPVTPSPSPWDNGTESKAPDMTSSTSPVTTPTP | |
| | NATSPTPAVTTPTPNATSPTPAVTTPTPNATSPTLGKTSPTSAV | |
| | TTPTPNATGPTVGETSPQANATNHTLGGTSPTPVVTSQPKNAT | |
| | SAVTTGQHNITSSSTSSMSLRPSSNPETLSPSTSDNSTSHMPLLT | |
| | SAHPTGGENITQVTPASISTHHVSTSSPAPRPGTTSQASGPGNS | |
| | STSTKPGEVNVTKGTPPQNATSPQAPSGQKTAVPTVTSTGGK | |
| | ANSTTGGKHTTGHGARTSTEPTTDYGGDSTTPRPRYNATTYL | |
| | PPSTSSKLRPRWTFTSPPVTTAQATVPVPPTSQPRFSNLSMLVL | |
| | QWASLAVLTLLLLLVMADCAFRRNLSTSHTYTTPPYDDAETY | |
| | V | |
| PolyA tail | 100 nt | |

V8_NGM N345_EBV_gp350_001

| SEQ ID NO: 199 consists of from 5′ end to 3′ end: | | 199 |
|---|---|---|
| 5′ UTR SEQ ID NO: 1, mRNA ORF SEQ ID NO: 102, and | | |
| 3′ UTR SEQ ID NO: 3 | | |
| Chemistry | 1-methylpseudouridine | |
| Cap | 7mG(5′)ppp(5′)NlmpNp | |
| 5′ UTR | GGGAAAUAAGAGAGAAAAGAAGAGUAAGAAGAAAUAUA | 1 |
| | AGAGCCACC | |
| ORF of mRNA | AUGGAGGCAGCACUGCUGGUCUGCCAGUAUACAAUCCAG | 102 |
| Construct | UCGCUCAUUCAUCUGACAGGCGAGGACCCCGGCUUCUUU | |
| (excluding | AACGUGGAAAUCCCAGAGUUCCCUUUCUAUCCAACCUGU | |
| the stop | AACGUUUGCACUGCUGACGUGAACGUGACAAUCAAUUUC | |
| codon) | GACGUGGGAGGAAAGAAGCAUCAGCUUGAUCUGGAUUUC | |
| | GGCCAACUGACGCCACACACCAAAGCGGUGUACCAACCAA | |
| | GGGGUGCAUUUGGAGGGAGCGAGAAUGCUACAAAUCUGU | |
| | UCUUACUGGAACUGCUUGGUGCAGGAGAGCUGGCACUAA | |
| | CCAUGCGAAGCAAGAAGCUCCCCAUCAACGUUACCACCGG | |
| | GGAAGAACAGCAAGUCAGCCUUGAAUCCGUGGAUGUGUA | |
| | CUUUCAGGAUGUUUUCGGCACCAUGUGGUGUCACCACGC | |
| | UGAGAUGCAGAAUCCCGUGUAUCUCAUACCCGAGACUGU | |
| | ACCCUACAUCAAGUGGGAUAAUUGCAAUUCAACUAAUAU | |
| | UACGGCUGUGGUGAGGGCCCAGGGCUUGGACGUGACUCU | |
| | GCCCUUAUCUCUACCUACUUCUGCCCAAGACUCCAAUUUC | |
| | UCUGUCAAGACCGAGAUGCUCGGGAAUGAGAUCGAUAUC | |
| | GAGUGCAUCAUGGAGGACGGUGAGAUAAGCCAGGUUCUG | |
| | CCCGGCGACAACAAGUUCAAUAUCACUUGUUCUGGCUAC | |
| | GAGUCCCAUGUGCCUAGUGGUGGCAUACUCACAAGUACU | |
| | UCUCCCGUAGCCACGCCCAUUCCCGGAACCGGAUACGCCU | |
| | ACAGUCUGCGUCUGACCCCACGGCCUGUGUCCAGAUUCCU | |
| | GGGUAACAAUAGUAUCUUAUACGUGUUUUAUAGCGGAAA | |
| | CGGCCCUAAAGCGUCCGGAGGGGACUAUUGUAUUCAGAG | |
| | UAAUAUCGUUUUCUCUGAUGAGAUUCCUGCCAGUCAGGA | |
| | CAUGCCGACAAACACAACUGAUAUUACCUACGUGGGCGA | |
| | CAAUGCCACGUAUUCAGUGCCCAUGGUCACGAGCGAGGA | |
| | CGCCAAUUCACCAAAUGUUGCGGUAACAGCUUUCUGGGC | |
| | CUGGCCAAAUAACACUGAGACUGACUUCAAAUGUAAGUG | |
| | GACUUUGACCUCUGGAACUCCGUCGGGUUGCGAGAAUAU | |
| | CAGCGGGGCCUUUGCUUCCAACAGGACUUUCGACAUCAC | |
| | UGUCUCAGGGCUGGGGACAGCACCGAAGACAUUAAUCAU | |
| | AACACGGACCGCCACCAACGCCACGACUACAACCCAUAAG | |
| | GUGAUCUUUUCCAAGGCACCUGAGUCCACCACUACCUCCC | |
| | CGACUCUUAACACUACGGGCUUCGCUGAUCCCAACACCAC | |
| | UACGGGGUUGCCUAGCUCGACACAUGUGCCGACGAACCU | |
| | GACUGCCCCUGCAUCGACCGGGCCCACAGUUUCGACCGCC | |
| | GAUGUGACAUCACCAACGCCCGCAGGUACAACCUCAGGC | |
| | GCCAGCCCAGUGACCCCUUCCCCAAGCCCCUGGGAUAAUG | |
| | GAACGGAGUCCAAGGCUCCUGAUAUGACUUCCUCUACCA | |
| | GCCCCGUGACUACACCCACUCCCAACGCAACUAGCCCAAC | |
| | CCCAGCUGUGACGACGCCCACCCCGAACGCGACAUCUCCC | |
| | ACACCUGCUGUGACAACCCCAACCCCUAACGCCACUAGCC | |
| | CUACCCUAGGUAAGACCAGUCCGACUAGCGCCGUUACAA | |
| | CCCCUACCCCUAACGCAACCGGCCCGACCGUGGGCGAGAC | |
| | UUCCCCGCAAGCCAAUGCGACAAAUCACACAUUGGGCGG | |
| | GACCUCUCCUACACCAGUCGUUACAUCUCAGCCUAAGAAC | |
| | GCUACCUCCGCUGUCACUACCGGACAGCACAACAUCACCA | |
| | GCUCAAGCACGAGUUCCAUGAGCUUGCGGCCGAGCUCAA | |
| | AUCCCGAGACCCUAUCACCAUCCACAUCAGACAACAGUAC | |
| | UUCACACAUGCCACUCUUGACGAGCGCUCACCCCACCGGC | |
| | GGCGAGAACAUCACCCAGGUGACUCCGGCGUCUAUUUCC | |
| | ACCCACCACGUCAGCACGUCGUCUCCCGCACCGAGACCAG | |
| | GGACGACUUCUCAGGCCAGUGGGCCUGGCAACUCCUCUA | |
| | CAAGCACAAAGCCAGGCGAAGUUAACGUGACAAAGGGAA | |
| | CGCCUCCCCAGAACGCAACCAGUCCUCAGGCGCCCAGCGG | |
| | GCAGAAGACUGCGGUGCCAACUGUGACCAGCACCGGUGG | |
| | CAAGGCCAACUCAACAACUGGAGGCAAGCAUACGACGGG | |
| | GCACGGCGCCCGGACCUCCACUGAACCCACGACCGAUUAC | |
| | GGAGGUGACAGCACAACACCGCGGCCACGAUAUAAUGCC | |
| | ACCACUUAUCUGCCACCAUCCACAAGCUCCAAGCUGCGGC | |
| | CACGGUGGACCUUCACAAGCCCACCCGUGACGACUGCCCA | |
| | AGCGACGGUGCCAGUGCCACCUACAAGCCAGCCACGCUUC | |
| | UCCAACCUUAGUAUGCUCGUUCUCCAGUGGGCCAGCCUU | |
| | GCUGUUCUGACCCUCCUCCUGCUGCUCGUGAUGGCCGAU | |
| | UGCGCCUUUAGGAGAAACCUCAGCACUAGCCACACGUAC | |
| | ACCACGCCGCCCUACGAUGACGCCGAGACUUACGUC | |
| 3′ UTR | UGAUAAUAGGCUGGAGCCUCGGUGGCCAUGCUUCUUGCC | 3 |
| | CCUUGGGCCUCCCCCCAGCCCCUCCUCCCCUUCCUGCACC | |
| | CGUACCCCCGUGGUCUUUGAAUAAAGUCUGAGUGGGCGG | |
| | C | |
| Corresponding | MEAALLVCQYTIQSLIHLTGEDPGFFNVEIPEFPFYPTCNVCTA | 114 |
| amino acid | DVNVTINFDVGGKKHQLDLDFGQLTPHTKAVYQPRGAFGGS | |
| sequence | ENATNLFLLELLGAGELALTMRSKKLPINVTTGEEQQVSLESV | |
| | DVYFQDVFGTMWCHHAEMQNPVYLIPETVPYIKWDNCNSTN | |
| | ITAVVRAQGLDVTLPLSLPTSAQDSNFSVKTEMLGNEIDIECIM | |
| | EDGEISQVLPGDNKFNITCSGYESHVPSGGILTSTSPVATPIPGT | |
| | GYAYSLRLTPRPVSRFLGNNSILYVFYSGNGPKASGGDYCIQS | |
| | NIVFSDEIPASQDMPTNTTDITYVGDNATYSVPMVTSEDANSP | |
| | NVAVTAFWAWPNNTETDFKCKWTLTSGTPSGCENISGAFASN | |
| | RTFDITVSGLGTAPKTLIITRTATNATTTTHKVIFSKAPESTTTS | |
| | PTLNTTGFADPNTTTGLPSSTHVPTNLTAPASTGPTVSTADVTS | |
| | PTPAGTTSGASPVTPSPSPWDNGTESKAPDMTSSTSPVTTPTPN | |
| | ATSPTPAVTTPTPNATSPTPAVTTPTPNATSPTLGKTSPTSAVT | |
| | TPTPNATGPTVGETSPQANATNHTLGGTSPTPVVTSQPKNATS | |
| | AVTTGQHNITSSSTSSMSLRPSSNPETLSPSTSDNSTSHMPLLTS | |
| | AHPTGGENITQVTPASISTHHVSTSSPAPRPGTTSQASGPGNSS | |
| | TSTKPGEVNVTKGTPPQNATSPQAPSGQKTAVPTVTSTGGKA | |
| | NSTTGGKHTTGHGARTSTEPTTDYGGDSTTPRPRYNATTYLPP | |
| | STSSKLRPRWTFTSPPVTTAQATVPVPPTSQPRFSNLSMLVLQ | |
| | WASLAVLTLLLLLVMADCAFRRNLSTSHTYTTPPYDDAETYV | |
| PolyA tail | 100 nt | |

V9_NGM N411_EBV_gp350_001

| SEQ ID NO: 200 consists of from 5′ end to 3′ end: | | 200 |
|---|---|---|
| 5′ UTR SEQ ID NO: 1, mRNA ORF SEQ ID NO: 103, and | | |
| 3′ UTR SEQ ID NO: 3 | | |
| Chemistry | 1-methylpseudouridine | |
| Cap | 7mG(5′)ppp(5′)NlmpNp | |
| 5′UTR | GGGAAAUAAGAGAGAAAAGAAGAGUAAGAAGAAAUAUA | 1 |
| | AGAGCCACC | |
| ORF of mRNA | AUGGAGGCAGCACUGCUGGUCUGCCAGUAUACAAUCCAG | 103 |
| Construct | UCGCUCAUUCAUCUGACAGGCGAGGACCCCGGCUUCUUU | |
| (excluding | AACGUGGAAAUCCCAGAGUUCCCUUUCUAUCCAACCUGU | |
| the stop | AACGUUUGCACUGCUGACGUGAACGUGACAAUCAAUUUC | |
| codon) | GACGUGGGAGGAAAGAAGCAUCAGCUUGAUCUGGAUUUC | |
| | GGCCAACUGACGCCACACACCAAAGCGGUGUACCAACCAA | |
| | GGGGUGCAUUUGGAGGGAGCGAGAAUGCUACAAAUCUGU | |
| | UCUUACUGGAACUGCUUGGUGCAGGAGAGCUGGCACUAA | |
| | CCAUGCGAAGCAAGAAGCUCCCCAUCAACGUUACCACCGG | |
| | GGAAGAACAGCAAGUCAGCCUUGAAUCCGUGGAUGUGUA | |
| | CUUUCAGGAUGUUUUCGGCACCAUGUGGUGUCACCACGC | |
| | UGAGAUGCAGAAUCCCGUGUAUCUCAUACCCGAGACUGU | |
| | ACCCUACAUCAAGUGGGAUAAUUGCAAUUCAACUAAUAU | |
| | UACGGCUGUGGUGAGGGCCCAGGGCUUGGACGUGACUCU | |
| | GCCCUUAUCUCUACCUACUUCUGCCCAAGACUCCAAUUUC | |
| | UCUGUCAAGACCGAGAUGCUCGGGAAUGAGAUCGAUAUC | |
| | GAGUGCAUCAUGGAGGACGGUGAGAUAAGCCAGGUUCUG | |
| | CCCGGCGACAACAAGUUCAAUAUCACUUGUUCUGGCUAC | |
| | GAGUCCCAUGUGCCUAGUGGUGGCAUACUCACAAGUACU | |
| | UCUCCCGUAGCCACGCCCAUUCCCGGAACCGGAUACGCCU | |
| | ACAGUCUGCGUCUGACCCCACGGCCUGUGUCCAGAUUCCU | |
| | GGGUAACAAUAGUAUCUUAUACGUGUUUUAUAGCGGAAA | |
| | CGGCCCUAAAGCGUCCGGAGGGGACUAUUGUAUUCAGAG | |
| | UAAUAUCGUUUUCUCUGAUGAGAUUCCUGCCAGUCAGGA | |
| | CAUGCCGACAAACACAACUGAUAUUACCUACGUGGGCGA | |
| | CAAUGCCACGUAUUCAGUGCCCAUGGUCACGAGCGAGGA | |
| | CGCCAAUUCACCAAAUGUUACUGUAACAGCUUUCUGGGC | |
| | CUGGCCAAAUAACACUGAGACUGACUUCAAAUGUAAGUG | |
| | GACUUUGACCUCUGGAACUCCGUCGGGUUGCGAGAAUAU | |
| | CAGCGGGGCCUUUGCUUCCAACAGGACUUUCGACAUCAC | |
| | UGUCUCAGGGCUGGGGACAGCACCGAAGACAUUAAUCAU | |
| | AACACGGACCGCCACCAACGCCGCGACUACAACCCAUAAG | |
| | GUGAUCUUUUCCAAGGCACCUGAGUCCACCACUACCUCCC | |
| | CGACUCUUAACACUACGGGCUUCGCUGAUCCCAACACCAC | |
| | UACGGGGUUGCCUAGCUCGACACAUGUGCCGACGAACCU | |
| | GACUGCCCCUGCAUCGACCGGGCCCACAGUUUCGACCGCC | |
| | GAUGUGACAUCACCAACGCCCGCAGGUACAACCUCAGGC | |
| | GCCAGCCCAGUGACCCCUUCCCCAAGCCCCUGGGAUAAUG | |
| | GAACGGAGUCCAAGGCUCCUGAUAUGACUUCCUCUACCA | |
| | GCCCCGUGACUACACCCACUCCCAACGCAACUAGCCCAAC | |
| | CCCAGCUGUGACGACGCCCACCCCGAACGCGACAUCUCCC | |
| | ACACCUGCUGUGACAACCCCAACCCCUAACGCCACUAGCC | |
| | CUACCCUAGGUAAGACCAGUCCGACUAGCGCCGUUACAA | |
| | CCCCUACCCCUAACGCAACCGGCCCGACCGUGGGCGAGAC | |
| | UUCCCCGCAAGCCAAUGCGACAAAUCACACAUUGGGCGG | |
| | GACCUCUCCUACACCAGUCGUUACAUCUCAGCCUAAGAAC | |
| | GCUACCUCCGCUGUCACUACCGGACAGCACAACAUCACCA | |
| | GCUCAAGCACGAGUUCCAUGAGCUUGCGGCCGAGCUCAA | |
| | AUCCCGAGACCCUAUCACCAUCCACAUCAGACAACAGUAC | |
| | UUCACACAUGCCACUCUUGACGAGCGCUCACCCCACCGGC | |
| | GGCGAGAACAUCACCCAGGUGACUCCGGCGUCUAUUUCC | |
| | ACCCACCACGUCAGCACGUCGUCUCCCGCACCGAGACCAG | |
| | GGACGACUUCUCAGGCCAGUGGGCCUGGCAACUCCUCUA | |
| | CAAGCACAAAGCCAGGCGAAGUUAACGUGACAAAGGGAA | |
| | CGCCUCCCCAGAACGCAACCAGUCCUCAGGCGCCCAGCGG | |
| | GCAGAAGACUGCGGUGCCAACUGUGACCAGCACCGGUGG | |
| | CAAGGCCAACUCAACAACUGGAGGCAAGCAUACGACGGG | |
| | GCACGGCGCCCGGACCUCCACUGAACCCACGACCGAUUAC | |
| | GGAGGUGACAGCACAACACCGCGGCCACGAUAUAAUGCC | |
| | ACCACUUAUCUGCCACCAUCCACAAGCUCCAAGCUGCGGC | |
| | CACGGUGGACCUUCACAAGCCCACCCGUGACGACUGCCCA | |
| | AGCGACGGUGCCAGUGCCACCUACAAGCCAGCCACGCUUC | |
| | UCCAACCUUAGUAUGCUCGUUCUCCAGUGGGCCAGCCUU | |
| | GCUGUUCUGACCCUCCUCCUGCUGCUCGUGAUGGCCGAU | |
| | UGCGCCUUUAGGAGAAACCUCAGCACUAGCCACACGUAC | |
| | ACCACGCCGCCCUACGAUGACGCCGAGACUUACGUC | |
| 3′ UTR | UGAUAAUAGGCUGGAGCCUCGGUGGCCAUGCUUCUUGCC | 3 |
| | CCUUGGGCCUCCCCCCAGCCCCUCCUCCCCUUCCUGCACC | |
| | CGUACCCCCGUGGUCUUUGAAUAAAGUCUGAGUGGGCGG | |
| | C | |
| Corresponding | MEAALLVCQYTIQSLIHLTGEDPGFFNVEIPEFPFYPTCNVCTA | 70 |
| amino acid | DVNVTINFDVGGKKHQLDLDFGQLTPHTKAVYQPRGAFGGS | |
| sequence | ENATNLFLLELLGAGELALTMRSKKLPINVTTGEEQQVSLESV | |
| | DVYFQDVFGTMWCHHAEMQNPVYLIPETVPYIKWDNCNSTN | |
| | ITAVVRAQGLDVTLPLSLPTSAQDSNFSVKTEMLGNEIDIECIM | |
| | EDGEISQVLPGDNKFNITCSGYESHVPSGGILTSTSPVATPIPGT | |
| | GYAYSLRLTPRPVSRFLGNNSILYVFYSGNGPKASGGDYCIQS | |
| | NIVFSDEIPASQDMPTNTTDITYVGDNATYSVPMVTSEDANSP | |
| | NVTVTAFWAWPNNTETDFKCKWTLTSGTPSGCENISGAFASN | |
| | RTFDITVSGLGTAPKTLIITRTATNAATTTHKVIFSKAPESTTTS | |
| | PTLNTTGFADPNTTTGLPSSTHVPTNLTAPASTGPTVSTADVTS | |
| | PTPAGTTSGASPVTPSPSPWDNGTESKAPDMTSSTSPVTTPTPN | |
| | ATSPTPAVTTPTPNATSPTPAVTTPTPNATSPTLGKTSPTSAVT | |
| | TPTPNATGPTVGETSPQANATNHTLGGTSPTPVVTSQPKNATS | |
| | AVTTGQHNITSSSTSSMSLRPSSNPETLSPSTSDNSTSHMPLLTS | |
| | AHPTGGENITQVTPASISTHHVSTSSPAPRPGTTSQASGPGNSS | |
| | TSTKPGEVNVTKGTPPQNATSPQAPSGQKTAVPTVTSTGGKA | |
| | NSTTGGKHTTGHGARTSTEPTTDYGGDSTTPRPRYNATTYLPP | |
| | STSSKLRPRWTFTSPPVTTAQATVPVPPTSQPRFSNLSMLVLQ | |
| | WASLAVLTLLLLLVMADCAFRRNLSTSHTYTTPPYDDAETYV | |
| PolyA tail | 100 nt | |

EBV gH (BXLF2)

| SEQ ID NO: 201 consists of from 5′ end to 3′ end: | | 201 |
|---|---|---|
| 5′ UTR SEQ ID NO: 104, mRNA ORF SEQ ID NO: 106, and | | |
| 3′ UTR SEQ ID NO: 106 | | |
| Chemistry | 1-methylpseudouridine | |
| Cap | 7mG(5′)ppp(5′)NlmpNp | |
| 5′ UTR | GGGAAAUAAGAGAGAAAAGAAGAGUAAGAAGAAAUAUA | 104 |
| | AGACCCCGGCGCCGCCACC | |
| ORF of mRNA | AUGCAGUUGUUGUGCGUGUUCUGCCUCGUGUUACUCUGG | 105 |
| Construct | GAGGUGGGCGCCGCCAGCCUUAGCGAGGUGAAGCUCCAC | |
| (excluding | UUGGACAUCGAGGGCCACGCCAGCCACUACACCAUCCCCU | |
| the stop | GGACCGAGCUCAUGGCCAAGGUGCCCGGCCUUAGCCCCGA | |
| codon) | GGCCCUGUGGCGGGAGGCCAACGUGACCGAGGACCUGGC | |
| | CAGCAUGCUGAACCGGUACAAGCUGAUCUACAAGACCAG | |
| | CGGCACCCUGGGCAUCGCCCUGGCCGAGCCCGUGGACAUC | |
| | CCCGCCGUUAGCGAAGGCAGCAUGCAGGUGGACGCCAGC | |
| | AAGGUGCACCCCGGCGUGAUCAGCGGCCUGAACAGCCCCG | |
| | CCUGUAUGUUGAGCGCCCCACUGGAGAAGCAGCUGUUCU | |
| | ACUACAUCGGCACCAUGCUGCCCAACACCCGGCCCCACAG | |
| | CUACGUGUUCUACCAGCUGCGGUGCCACCUGAGCUACGU | |
| | UGCCCUGAGCAUCAACGGCGACAAGUUCCAGUACACCGG | |
| | CGCCAUGACCAGCAAGUUCCUGAUGGGCACCUACAAGCG | |
| | GGUCACCGAGAAGGGCGACGAGCACGUGCUGUCACUGGU | |
| | GUUCGGCAAGACCAAGGACCUGCCCGACCUGCGGGGCCCC | |
| | UUCAGCUACCCUAGUUUGACCAGCGCCCAGAGCGGCGAC | |
| | UACAGCUUGGUGAUCGUGACCACCUUCGUGCACUACGCC | |
| | AACUUCCACAACUACUUCGUGCCCAACCUGAAGGACAUG | |
| | UUCAGCCGGGCCGUGACCAUGACUGCCGCUUCUUACGCCC | |
| | GGUACGUGCUGCAGAAGCUGGUCCUGCUGGAGAUGAAGG | |
| | GCGGCUGCCGGGAGCCCGAGCUGGACACCGAAACACUGA | |
| | CCACCAUGUUCGAGGUGAGCGUGGCCUUCUUCAAGGUGG | |
| | GUCACGCGGUGGGCGAAACCGGCAACGGCUGCGUGGACU | |
| | UACGCUGGCUGGCCAAGAGCUUCUUCGAGCUGACCGUGC | |
| | UGAAGGAUAUCAUCGGCAUCUGCUACGGCGCCACCGUGA | |
| | AGGGCAUGCAGAGCUACGGCCUGGAGCGGCUGGCCGCCA | |
| | UGCUUAUGGCAACAGUGAAGAUGGAGGAGCUGGGACACC | |
| | UGACAACAGAGAAGCAGGAGUACGCCCUGAGACUGGCCA | |
| | CAGUGGGCUACCCAAAGGCCGGCGUGUACAGUGGACUGA | |
| | UCGGCGGCGCAACCAGCGUGCUGCUAUCCGCUUACAACCG | |
| | GCACCCGCUGUUCCAGCCCCUGCACACCGUGAUGCGGGAA | |
| | ACCCUGUUCAUCGGAAGCCACGUCGUGCUGCGGGAGCUG | |
| | AGGCUGAACGUAACCACCCAGGGCCCUAAUCUGGCCCUG | |
| | UAUCAGCUCCUCAGUACCGCCCUGUGCAGCGCCCUUGAGA | |
| | UCGGCGAGGUGCUCAGAGGCCUGGCCCUCGGUACCGAGA | |
| | GCGGCCUCUUCAGCCCAUGCUACUUAAGCCUGCGGUUCG | |
| | ACCUGACCCGGGACAAGUUGCUGAGCAUGGCCCCGCAGG | |
| | AGGCCACACUGGACCAGGCAGCUGUAUCCAACGCCGUGG | |
| | ACGGCUUCCUGGGCAGACUGUCCCUGGAACGGGAGGACC | |
| | GGGACGCCUGGCACCUGCCUGCCUACAAGUGUGUGGAUC | |
| | GGCUGGACAAGGUGCUGAUGAUCAUCCCUCUGAUUAAUG | |
| | UCACCUUCAUCAUCAGCAGCGACCGGGAGGUGCGGGGAU | |
| | CCGCCCUCUACGAGGCCAGCACCACCUAUCUGAGCAGCAG | |
| | CCUGUUCCUGUCUCCUGUGAUCAUGAACAAGUGCAGCCA | |
| | GGGCGCCGUGGCCGGCGAGCCCCGGCAGAUCCCCAAGAUC | |
| | CAGAACUUCACCCGGACCCAGAAGUCUUGCAUCUUCUGC | |
| | GGCUUCGCCCUUUUGUCCUACGACGAGAAGGAGGGCUUG | |
| | GAGACUACAACCUACAUCACCAGCCAGGAGGUGCAGAAC | |
| | AGCAUCCUGUCAUCUAAUUACUUCGACUUCGACAACCUG | |
| | CACGUUCAUUACCUGCUCCUCACCACCAACGGUACCGUCA | |
| | UGGAAAUCGCCGGACUGUACGAGGAGCGGGCCCAUGUUG | |
| | UGCUGGCCAUCAUCCUGUACUUCAUCGCUUUCGCACUUG | |
| | GCAUCUUCCUGGUGCACAAGAUCGUGAUGUUCUUCCUG | |
| 3′ UTR | UGAUAAUAGGCUGGAGCCUCGGUGGCCUAGCUUCUUGCC | 106 |
| | CCUUGGGCCUCCCCCCAGCCCCUCCUCCCCUUCCUGCACC | |
| | CGUACCCCCGUGGUCUUUGAAUAAAGUCUGAGUGGGCGG | |
| | C | |
| Corresponding | MQLLCVFCLVLLWEVGAASLSEVKLHLDIEGHASHYTIPWTE | 38 |
| amino acid | LMAKVPGLSPEALWREANVTEDLASMLNRYKLIYKTSGTLGI | |
| sequence | ALAEPVDIPAVSEGSMQVDASKVHPGVISGLNSPACMLSAPLE | |
| | KQLFYYIGTMLPNTRPHSYVFYQLRCHLSYVALSINGDKFQYT | |
| | GAMTSKFLMGTYKRVTEKGDEHVLSLVFGKTKDLPDLRGPFS | |
| | YPSLTSAQSGDYSLVIVTTFVHYANFHNYFVPNLKDMFSRAV | |
| | TMTAASYARYVLQKLVLLEMKGGCREPELDTETLTTMFEVS | |
| | VAFFKVGHAVGETGNGCVDLRWLAKSFFELTVLKDIIGICYG | |
| | ATVKGMQSYGLERLAAMLMATVKMEELGHLTTEKQEYALR | |
| | LATVGYPKAGVYSGLIGGATSVLLSAYNRHPLFQPLHTVMRE | |
| | TLFIGSHVVLRELRLNVTTQGPNLALYQLLSTALCSALEIGEVL | |
| | RGLALGTESGLFSPCYLSLRFDLTRDKLLSMAPQEATLDQAA | |
| | VSNAVDGFLGRLSLEREDRDAWHLPAYKCVDRLDKVLMIIPL | |
| | INVTFIISSDREVRGSALYEASTTYLSSSLFLSPVIMNKCSQGAV | |
| | AGEPRQIPKIQNFTRTQKSCIFCGFALLSYDEKEGLETTTYITSQ | |
| | EVQNSILSSNYFDFDNLHVHYLLLTTNGTVMEIAGLYEERAH | |
| | VVLAIILYFIAFALGIFLVHKIVMFFL | |
| PolyA tail | 100 nt | |

EBV gL (B95-8)

| SEQ ID NO: 202 consists of from 5′ end to 3′ end: | | 202 |
|---|---|---|
| 5′ UTR SEQ ID NO: 104, mRNA ORF SEQ ID NO: 107, and | | |
| 3′ UTR SEQ ID NO: 106 | | |
| Chemistry | 1-methylpseudouridine | |
| Cap | 7mG(5′)ppp(5′)NlmpNp | |
| 5′ UTR | GGGAAAUAAGAGAGAAAAGAAGAGUAAGAAGAAAUAUA | 104 |
| | AGACCCCGGCGCCGCCACC | |
| ORF of mRNA | AUGAGAGCCGUGGGCGUGUUCCUGGCCAUCUGCCUGGUG | 107 |
| Construct | ACCAUCUUCGUGCUGCCCACCUGGGGCAACUGGGCCUACC | |
| (excluding | CCUGCUGCCACGUGACCCAGCUGAGAGCCCAGCACCUGCU | |
| the stop | GGCCCUGGAGAACAUCAGCGACAUCUACCUGGUGAGCAA | |
| codon) | CCAGACCUGCGACGGCUUCAGCCUGGCCAGCCUGAACAGC | |
| | CCCAAGAACGGCAGCAACCAGCUGGUGAUCAGCAGAUGC | |
| | GCCAACGGCCUGAACGUGGUGAGCUUCUUCAUCAGCAUC | |
| | CUGAAGAGAAGCAGCAGCGCCCUGACCGGCCACCUGAGA | |
| | GAGCUGCUGACCACCCUGGAGACCCUGUACGGCAGCUUC | |
| | AGCGUGGAGGACCUGUUCGGCGCCAACCUGAACAGAUAC | |
| | GCCUGGCACAGAGGCGGC | |
| 3′ UTR | UGAUAAUAGGCUGGAGCCUCGGUGGCCUAGCUUCUUGCC | 106 |
| | CCUUGGGCCUCCCCCCAGCCCCUCCUCCCCUUCCUGCACC | |
| | CGUACCCCCGUGGUCUUUGAAUAAAGUCUGAGUGGGCGG | |
| | C | |
| Corresponding | MRAVGVFLAICLVTIFVLPTWGNWAYPCCHVTQLRAQHLLA | 36 |
| amino acid | LENISDIYLVSNQTCDGFSLASLNSPKNGSNQLVISRCANGLNV | |
| sequence | VSFFISILKRSSSALTGHLRELLTTLETLYGSFSVEDLFGANLNR | |
| | YAWHRGG | |
| PolyA tail | 100 nt | |

EBV gp42 (B95-8)

| SEQ ID NO: 203 consists of from 5′ end to 3′ end: | | 203 |
|---|---|---|
| 5′ UTR SEQ ID NO: 104, mRNA ORF SEQ ID NO: 108, and | | |
| 3′ UTR SEQ ID NO: 1-6 | | |
| Chemistry | 1-methylpseudouridine | |
| Cap | 7mG(5′)ppp(5′)NlmpNp | |
| 5′ UTR | GGGAAAUAAGAGAGAAAAGAAGAGUAAGAAGAAAUAUA | 104 |
| | AGACCCCGGCGCCGCCACC | |
| ORF of mRNA | AUGGUGAGCUUCAAGCAGGUGAGAGUGCCCCUGUUCACC | 108 |
| Construct | GCCAUCGCCCUGGUGAUCGUGCUGCUGCUGGCCUACUUCC | |
| (excluding | UGCCACCCAGAGUGAGAGGCGGCGGCAGAGUGGCCGCCG | |
| the stop | CCGCCAUCACCUGGGUGCCCAAGCCCAACGUGGAGGUGU | |
| codon) | GGCCCGUGGACCCGCCACCUCCCGUGAACUUCAACAAGAC | |
| | CGCCGAGCAGGAGUACGGCGACAAGGAGGUGAAGCUGCC | |
| | CCACUGGACGCCGACCCUGCACACCUUCCAGGUGCCCCAG | |
| | AACUACACCAAGGCCAACUGCACCUACUGCAACACCAGAG | |
| | AGUACACCUUCAGCUACAAGGGCUGCUGCUUCUACUUCA | |
| | CCAAGAAGAAGCACACCUGGAACGGCUGCUUCCAGGCCU | |
| | GCGCCGAGCUGUACCCCUGCACCUACUUCUACGGCCCCAC | |
| | CCCAGACAUCCUGCCCGUGGUGACCAGAAACCUGAACGCC | |
| | AUCGAGAGCCUGUGGGUGGGCGUGUACAGAGUGGGCGAG | |
| | GGCAACUGGACCAGCCUGGACGGCGGCACCUUCAAGGUG | |
| | UACCAGAUCUUCGGCAGCCACUGCACCUACGUGAGCAAG | |
| | UUCAGCACCGUGCCCGUGAGCCACCACGAGUGCAGCUUCC | |
| | UGAAGCCCUGCCUGUGCGUGAGCCAGAGAAGCAACAGC | |
| 3′ UTR | UGAUAAUAGGCUGGAGCCUCGGUGGCCUAGCUUCUUGCC | 106 |
| | CCUUGGGCCUCCCCCCAGCCCCUCCUCCCCUUCCUGCACC | |
| | CGUACCCCCGUGGUCUUUGAAUAAAGUCUGAGUGGGCGG | |
| | C | |
| Corresponding | MVSFKQVRVPLFTAIALVIVLLLAYFLPPRVRGGGRVAAAAIT | 34 |
| amino acid | WVPKPNVEVWPVDPPPPVNFNKTAEQEYGDKEVKLPHWTPT | |
| sequence | LHTFQVPQNYTKANCTYCNTREYTFSYKGCCFYFTKKKHTW | |
| | NGCFQACAELYPCTYFYGPTPDILPVVTRNLNAIESLWVGVYR | |
| | VGEGNWTSLDGGTFKVYQIFGSHCTYVSKFSTVPVSHHECSFL | |
| | KPCLCVSQRSNS | |
| PolyA tail | 100 nt | |

EBV gp350_001 (modified)

| SEQ ID NO: 204 consists of from 5′ end to 3′ end: | | 204 |
|---|---|---|
| 5′ UTR SEQ ID NO: 104, mRNA ORF SEQ ID NO: 109, and | | |
| 3′ UTR SEQ ID NO: 106 | | |
| Chemistry | 1-methylpseudouridine | |
| Cap | 7mG(5′)ppp(5′)NlmpNp | |
| 5′UTR | GGGAAAUAAGAGAGAAAAGAAGAGUAAGAAGAAAUAUA | 104 |
| | AGACCCCGGCGCCGCCACC | |
| ORF of mRNA | AUGGAGGCAGCACUGCUGGUCUGCCAGUAUACAAUCCAG | 109 |
| Construct | UCGCUCAUUCAUCUGACAGGCGAGGACCCCGGCUUCUUU | |
| (excluding | AACGUGGAAAUCCCAGAGUUCCCUUUCUAUCCAACCUGU | |
| the stop | AACGUUUGCACUGCUGACGUGAACGUGACAAUCAAUUUC | |
| codon) | GACGUGGGAGGAAAGAAGCAUCAGCUUGAUCUGGAUUUC | |
| | GGCCAACUGACGCCACACACCAAAGCGGUGUACCAACCAA | |
| | GGGGUGCAUUUGGAGGGAGCGAGAAUGCUACAAAUCUGU | |
| | UCUUACUGGAACUGCUUGGUGCAGGAGAGCUGGCACUAA | |
| | CCAUGCGAAGCAAGAAGCUCCCCAUCAACGUUACCACCGG | |
| | GGAAGAACAGCAAGUCAGCCUUGAAUCCGUGGAUGUGUA | |
| | CUUUCAGGAUGUUUUCGGCACCAUGUGGUGUCACCACGC | |
| | UGAGAUGCAGAAUCCCGUGUAUCUCAUACCCGAGACUGU | |
| | ACCCUACAUCAAGUGGGAUAAUUGCAAUUCAACUAAUAU | |
| | UACGGCUGUGGUGAGGGCCCAGGGCUUGGACGUGACUCU | |
| | GCCCUUAUCUCUACCUACUUCUGCCCAAGACUCCAAUUUC | |
| | UCUGUCAAGACCGAGAUGCUCGGGAAUGAGAUCGAUAUC | |
| | GAGUGCAUCAUGGAGGACGGUGAGAUAAGCCAGGUUCUG | |
| | CCCGGCGACAACAAGUUCAAUAUCACUUGUUCUGGCUAC | |
| | GAGUCCCAUGUGCCUAGUGGUGGCAUACUCACAAGUACU | |
| | UCUCCCGUAGCCACGCCCAUUCCCGGAACCGGAUACGCCU | |
| | ACAGUCUGCGUCUGACCCCACGGCCUGUGUCCAGAUUCCU | |
| | GGGUAACAAUAGUAUCUUAUACGUGUUUUAUAGCGGAAA | |
| | CGGCCCUAAAGCGUCCGGAGGGGACUAUUGUAUUCAGAG | |
| | UAAUAUCGUUUUCUCUGAUGAGAUUCCUGCCAGUCAGGA | |
| | CAUGCCGACAAACACAACUGAUAUUACCUACGUGGGCGA | |
| | CAAUGCCACGUAUUCAGUGCCCAUGGUCACGAGCGAGGA | |
| | CGCCAAUUCACCAAAUGUUACUGUAACAGCUUUCUGGGC | |
| | CUGGCCAAAUAACACUGAGACUGACUUCAAAUGUAAGUG | |
| | GACUUUGACCUCUGGAACUCCGUCGGGUUGCGAGAAUAU | |
| | CAGCGGGGCCUUUGCUUCCAACAGGACUUUCGACAUCAC | |
| | UGUCUCAGGGCUGGGGACAGCACCGAAGACAUUAAUCAU | |
| | AACACGGACCGCCACCAACGCCACGACUACAACCCAUAAG | |
| | GUGAUCUUUUCCAAGGCACCUGAGUCCACCACUACCUCCC | |
| | CGACUCUUAACACUACGGGCUUCGCUGAUCCCAACACCAC | |
| | UACGGGGUUGCCUAGCUCGACACAUGUGCCGACGAACCU | |
| | GACUGCCCCUGCAUCGACCGGGCCCACAGUUUCGACCGCC | |
| | GAUGUGACAUCACCAACGCCCGCAGGUACAACCUCAGGC | |
| | GCCAGCCCAGUGACCCCUUCCCCAAGCCCCUGGGAUAAUG | |
| | GAACGGAGUCCAAGGCUCCUGAUAUGACUUCCUCUACCA | |
| | GCCCCGUGACUACACCCACUCCCAACGCAACUAGCCCAAC | |
| | CCCAGCUGUGACGACGCCCACCCCGAACGCGACAUCUCCC | |
| | ACACCUGCUGUGACAACCCCAACCCCUAACGCCACUAGCC | |
| | CUACCCUAGGUAAGACCAGUCCGACUAGCGCCGUUACAA | |
| | CCCCUACCCCUAACGCAACCGGCCCGACCGUGGGCGAGAC | |
| | UUCCCCGCAAGCCAAUGCGACAAAUCACACAUUGGGCGG | |
| | GACCUCUCCUACACCAGUCGUUACAUCUCAGCCUAAGAAC | |
| | GCUACCUCCGCUGUCACUACCGGACAGCACAACAUCACCA | |
| | GCUCAAGCACGAGUUCCAUGAGCUUGCGGCCGAGCUCAA | |
| | AUCCCGAGACCCUAUCACCAUCCACAUCAGACAACAGUAC | |
| | UUCACACAUGCCACUCUUGACGAGCGCUCACCCCACCGGC | |
| | GGCGAGAACAUCACCCAGGUGACUCCGGCGUCUAUUUCC | |
| | ACCCACCACGUCAGCACGUCGUCUCCCGCACCGAGACCAG | |
| | GGACGACUUCUCAGGCCAGUGGGCCUGGCAACUCCUCUA | |
| | CAAGCACAAAGCCAGGCGAAGUUAACGUGACAAAGGGAA | |
| | CGCCUCCCCAGAACGCAACCAGUCCUCAGGCGCCCAGCGG | |
| | GCAGAAGACUGCGGUGCCAACUGUGACCAGCACCGGUGG | |
| | CAAGGCCAACUCAACAACUGGAGGCAAGCAUACGACGGG | |
| | GCACGGCGCCCGGACCUCCACUGAACCCACGACCGAUUAC | |
| | GGAGGUGACAGCACAACACCGCGGCCACGAUAUAAUGCC | |
| | ACCACUUAUCUGCCACCAUCCACAAGCUCCAAGCUGCGGC | |
| | CACGGUGGACCUUCACAAGCCCACCCGUGACGACUGCCCA | |
| | AGCGACGGUGCCAGUGCCACCUACAAGCCAGCCACGCUUC | |
| | UCCAACCUUAGUAUGCUCGUUCUCCAGUGGGCCAGCCUU | |
| | GCUGUUCUGACCCUCCUCCUGCUGCUCGUGAUGGCCGAU | |
| | UGCGCCUUUAGGAGAAACCUCAGCACUAGCCACACGUAC | |
| | ACCACGCCGCCCUACGAUGACGCCGAGACUUACGUC | |
| 3′ UTR | UGAUAAUAGGCUGGAGCCUCGGUGGCCUAGCUUCUUGCC | 106 |
| | CCUUGGGCCUCCCCCCAGCCCCUCCUCCCCUUCCUGCACC | |
| | CGUACCCCCGUGGUCUUUGAAUAAAGUCUGAGUGGGCGG | |
| | C | |
| Corresponding | MEAALLVCQYTIQSLIHLTGEDPGFFNVEIPEFPFYPTCNVCTA | 28 |
| amino acid | DVNVTINFDVGGKKHQLDLDFGQLTPHTKAVYQPRGAFGGS | |
| sequence | ENATNLFLLELLGAGELALTMRSKKLPINVTTGEEQQVSLESV | |
| | DVYFQDVFGTMWCHHAEMQNPVYLIPETVPYIKWDNCNSTN | |
| | ITAVVRAQGLDVTLPLSLPTSAQDSNFSVKTEMLGNEIDIECIM | |
| | EDGEISQVLPGDNKFNITCSGYESHVPSGGILTSTSPVATPIPGT | |
| | GYAYSLRLTPRPVSRFLGNNSILYVFYSGNGPKASGGDYCIQS | |
| | NIVFSDEIPASQDMPTNTTDITYVGDNATYSVPMVTSEDANSP | |
| | NVTVTAFWAWPNNTETDFKCKWTLTSGTPSGCENISGAFASN | |
| | RTFDITVSGLGTAPKTLIITRTATNATTTTHKVIFSKAPESTTTS | |
| | PTLNTTGFADPNTTTGLPSSTHVPTNLTAPASTGPTVSTADVTS | |
| | PTPAGTTSGASPVTPSPSPWDNGTESKAPDMTSSTSPVTTPTPN | |
| | ATSPTPAVTTPTPNATSPTPAVTTPTPNATSPTLGKTSPTSAVT | |
| | TPTPNATGPTVGETSPQANATNHTLGGTSPTPVVTSQPKNATS | |
| | AVTTGQHNITSSSTSSMSLRPSSNPETLSPSTSDNSTSHMPLLTS | |
| | AHPTGGENITQVTPASISTHHVSTSSPAPRPGTTSQASGPGNSS | |
| | TSTKPGEVNVTKGTPPQNATSPQAPSGQKTAVPTVTSTGGKA | |
| | NSTTGGKHTTGHGARTSTEPTTDYGGDSTTPRPRYNATTYLPP | |
| | STSSKLRPRWTFTSPPVTTAQATVPVPPTSQPRFSNLSMLVLQ | |
| | WASLAVLTLLLLLVMADCAFRRNLSTSHTYTTPPYDDAETYV | |
| PolyA tail | 100 nt | |

EBV D123_Ferritin_RX

| SEQ ID NO: 205 consists of from 5′ end to 3′ end: | | 205 |
|---|---|---|
| 5′ UTR SEQ ID NO: 104, mRNA ORF SEQ ID NO: 110, and | | |
| 3′ UTR SEQ ID NO: 106 | | |
| Chemistry | 1-methylpseudouridine | |
| Cap | 7mG(5′)ppp(5′)NlmpNp | |
| 5′ UTR | GGGAAAUAAGAGAGAAAAGAAGAGUAAGAAGAAAUAUA | 104 |
| | AGACCCCGGCGCCGCCACC | |
| ORF of mRNA | AUGGACAGCAAGGGCAGCAGCCAGAAGGGAUCGAGGCUA | 110 |
| Construct | UUAUUGUUACUUGUGGUGAGCAACUUGCUCCUGCCUCAG | |
| (excluding | GGCGUGGUGGGCGAGGCCGCCUUGUUGGUGUGCCAGUAC | |
| the stop | ACCAUCCAGAGCCUCAUCCACCUCACCGGCGAGGACCCCG | |
| codon) | GCUUCUUCAACGUGGAGAUCCCCGAGUUCCCCUUCUACCC | |
| | CACCUGCAACGUGUGCACCGCCGACGUGAACGUGACCAUC | |
| | AACUUCGACGUGGGCGGCAAGAAGCACCAGCUGGACCUG | |
| | GACUUCGGCCAGCUGACCCCGCACACCAAGGCCGUGUACC | |
| | AGCCCAGGGGCGCCUUCGGCGGCAGCGAGAACGCCACCAA | |
| | CCUGUUCCUGCUGGAGCUGCUGGGCGCCGGCGAGCUGGC | |
| | CCUGACCAUGAGGUCCAAGAAGCUGCCCAUCAAUGUGAC | |
| | CACAGGAGAGGAGCAGCAGGUGAGCCUGGAGAGCGUGGA | |
| | CGUGUACUUCCAGGACGUGUUCGGCACCAUGUGGUGCCA | |
| | CCACGCCGAGAUGCAGAACCCAGUUUACUUGAUUCCUGA | |
| | GACAGUGCCCUACAUCAAGUGGGACAACUGCAACAGCAC | |
| | CAACAUCACCGCCGUGGUGAGGGCCCAGGGCCUGGACGU | |
| | GACCCUGCCCCUGAGCCUGCCCACCAGCGCCCAGGAUAGC | |
| | AACUUCAGCGUGAAGACCGAAAUGCUGGGCAACGAGAUC | |
| | GACAUCGAGUGCAUCAUGGAGGACGGCGAGAUCAGCCAG | |
| | GUGCUGCCCGGCGACAACAAGUUCAACAUUACCUGCAGC | |
| | GGCUACGAGAGCCACGUGCCCAGCGGCGGCAUCCUGACCU | |
| | CAACUUCACCCGUGGCCACUCCGAUCCCCGGCACCGGCUA | |
| | CGCCUACAGCCUGCGUCUGACACCUAGGCCCGUGAGCAGG | |
| | UUCCUGGGCAAUAACAGCAUCCUGUACGUGUUCUACAGC | |
| | GGCAACGGCCCCAAGGCUUCCGGCGGCGACUACUGUAUU | |
| | CAAUCAAACAUCGUGUUCAGCGACGAGAUACCAGCCAGC | |
| | CAGGACAUGCCUACUAACACCACCGACAUCACCUAUGUG | |
| | GGAGACAAUGCUACUUACAGCGUGCCCAUGGUGACCAGC | |
| | GAGGACGCCAACAGCCCAAAUGUCACCGUGACCGCCUUCU | |
| | GGGCCUGGCCCAACAACACUGAGACAGACUUCAAGUGCA | |
| | AGUGGACCCUCACAUCCGGCACCCCUAGCGGAUGCGAGA | |
| | ACAUCAGCGGAGCGUUCGCCAGCAACAGGACCUUCGAUA | |
| | UAACAGUGAGCGGCCUGGGCACCGCUCCUAAGACCCUGA | |
| | UCAUCACCAGGACGGCCACAAAUGCAACUACUACUACAC | |
| | ACAAGGUGAUCUUCAGCAAGGCUCCGGAAUCACAAGUGA | |
| | GGCAGCAGUUCUCAAAGGAUAUCGAGAAGCUUCUGAACG | |
| | AGCAAGUUAACAAGGAAAUGCAGAGCAGUAAUCUCUACA | |
| | UGAGCAUGAGCAGCUGGUGCUACACCCACUCCCUGGACG | |
| | GAGCAGGCCUCUUCCUGUUCGACCACGCAGCCGAGGAGU | |
| | ACGAGCACGCUAAGAAGUUGAUCAUUUUCUUGAACGAGA | |
| | ACAACGUGCCCGUGCAGCUAACGUCAAUCAGCGCACCUG | |
| | AGCACAAGUUCGAGGGCCUGACCCAGAUCUUCCAGAAGG | |
| | CCUACGAACACGAACAGCACAUCUCCGAGAGCAUCAACA | |
| | AUAUUGUGGAUCACGCUAUCAAGUCCAAGGACCACGCUA | |
| | CCUUCAACUUCCUGCAGUGGUACGUGGCCGAGCAACAUG | |
| | AGGAGGAGGUGCUGUUCAAGGACAUCCUGGACAAGAUCG | |
| | AGCUGAUCGGUAAUGAGAAUCACGGCCUGUACCUGGCCG | |
| | ACCAGUACGUGAAGGGCAUCGCCAAGAGCCGGAAGUCA | |
| 3′ UTR | UGAUAAUAGGCUGGAGCCUCGGUGGCCUAGCUUCUUGCC | 106 |
| | CCUUGGGCCUCCCCCCAGCCCCUCCUCCCCUUCCUGCACC | |
| | CGUACCCCCGUGGUCUUUGAAUAAAGUCUGAGUGGGCGG | |
| | C | |
| Corresponding | MDSKGSSQKGSRLLLLLVVSNLLLPQGVVGEAALLVCQYTIQ | 111 |
| amino acid | SLIHLTGEDPGFFNVEIPEFPFYPTCNVCTADVNVTINFDVGGK | |
| sequence | KHQLDLDFGQLTPHTKAVYQPRGAFGGSENATNLFLLELLGA | |
| | GELALTMRSKKLPINVTTGEEQQVSLESVDVYFQDVFGTMWC | |
| | HHAEMQNPVYLIPETVPYIKWDNCNSTNITAVVRAQGLDVTL | |
| | PLSLPTSAQDSNFSVKTEMLGNEIDIECIMEDGEISQVLPGDNK | |
| | FNITCSGYESHVPSGGILTSTSPVATPIPGTGYAYSLRLTPRPVS | |
| | RFLGNNSILYVFYSGNGPKASGGDYCIQSNIVFSDEIPASQDMP | |
| | TNTTDITYVGDNATYSVPMVTSEDANSPNVTVTAFWAWPNN | |
| | TETDFKCKWTLTSGTPSGCENISGAFASNRTFDITVSGLGTAPK | |
| | TLIITRTATNATTTTHKVIFSKAPESQVRQQFSKDIEKLLNEQV | |
| | NKEMQSSNLYMSMSSWCYTHSLDGAGLFLFDHAAEEYEHAK | |
| | KLIIFLNENNVPVQLTSISAPEHKFEGLTQIFQKAYEHEQHISESI | |
| | NNIVDHAIKSKDHATFNFLQWYVAEQHEEEVLFKDILDKIELI | |
| | GNENHGLYLADQYVKGIAKSRKS | |
| PolyA tail | 100 nt | |

EBV D123_LS

| SEQ ID NO: 206 consists of from 5′ end to 3′ end: | | 206 |
|---|---|---|
| 5′ UTR SEQ ID NO: 104, mRNA ORF SEQ ID NO: 112, and | | |
| 3′ UTR SEQ ID NO: 106 | | |
| Chemistry | 1-methylpseudouridine | |
| Cap | 7mG(5′)ppp(5′)NlmpNp | |
| 5′UTR | GGGAAAUAAGAGAGAAAAGAAGAGUAAGAAGAAAUAUA | 104 |
| | AGACCCCGGCGCCGCCACC | |
| ORF of mRNA | AUGGACAGCAAGGGCAGCAGCCAGAAGGGCUCCCGGUUG | 112 |
| Construct | UUGCUCUUGCUCGUGGUGAGCAACUUGUUGUUGCCUCAG | |
| (excluding | GGCGUGGUGGGCGAGGCCGCCUUGUUGGUGUGCCAGUAC | |
| the stop | ACCAUCCAGAGCCUCAUCCACCUCACCGGCGAGGACCCUG | |
| codon) | GCUUCUUCAACGUGGAGAUCCCUGAGUUCCCUUUCUACC | |
| | CUACCUGCAACGUGUGCACCGCCGACGUGAACGUGACCA | |
| | UCAACUUCGACGUGGGCGGCAAGAAGCACCAGCUGGACC | |
| | UGGACUUCGGCCAGCUGACCCCUCACACCAAGGCCGUGUA | |
| | CCAGCCUAGAGGCGCCUUCGGCGGCAGCGAGAACGCCACC | |
| | AACCUGUUCCUGCUGGAGCUGCUGGGCGCCGGCGAGCUG | |
| | GCCCUGACCAUGAGAAGUAAGAAGCUGCCUAUCAACGUC | |
| | ACUACUGGCGAGGAGCAGCAGGUGAGCCUGGAGAGCGUG | |
| | GACGUGUACUUCCAGGACGUGUUCGGCACCAUGUGGUGC | |
| | CACCACGCCGAGAUGCAGAACCCUGUGUACCUGAUCCCAG | |
| | AAACCGUGCCUUACAUCAAGUGGGACAACUGCAACAGCA | |
| | CCAACAUCACCGCUGUGGUGAGAGCCCAGGGCCUGGACG | |
| | UGACCCUGCCUCUGAGCCUGCCUACCAGCGCCCAAGACAG | |
| | UAACUUCAGCGUGAAGACGGAGAUGCUGGGCAACGAGAU | |
| | CGACAUCGAGUGCAUCAUGGAGGACGGCGAGAUCAGCCA | |
| | GGUGCUGCCUGGCGACAACAAGUUCAACAUAACAUGCAG | |
| | CGGCUACGAGAGCCACGUGCCUAGCGGCGGCAUCCUGACC | |
| | UCCACCAGCCCUGUGGCCACCCCUAUCCCUGGCACCGGCU | |
| | ACGCCUACAGCCUGAGACUCACGCCAAGACCUGUGAGCA | |
| | GAUUCUUAGGAAACAACAGCAUCCUGUACGUGUUCUACA | |
| | GCGGCAACGGCCCUAAGGCCUCCGGCGGUGACUACUGUA | |
| | UCCAGUCUAACAUCGUGUUCAGCGACGAAAUCCCAGCCA | |
| | GCCAGGACAUGCCUACAAACACCACCGACAUCACUUAUG | |
| | UCGGCGACAAUGCGACAUACAGCGUGCCUAUGGUGACCA | |
| | GCGAGGACGCCAACAGCCCUAACGUAACCGUGACCGCCUU | |
| | CUGGGCCUGGCCUAACAACACCGAAACCGACUUCAAGUG | |
| | CAAGUGGACUUUAACUAGUGGCACCCCUUCUGGCUGCGA | |
| | GAACAUCAGCGGCGCAUUCGCCAGCAACAGAACCUUCGA | |
| | UAUCACCGUGAGCGGCCUGGGCACCGCCCCUAAGACCCUG | |
| | AUCAUCACCAGAACCGCAACUAAUGCAACUACAACAACCC | |
| | ACAAGGUGAUCUUCAGCAAGGCCCCUGGCUCCGGCUCUG | |
| | CCGGCAGUGGCAGCGCAGGCAGUGGAUCCGCCGGUUCAG | |
| | GUUCCGCCAUGCAGAUCUACGAGGGCAAGCUGACCGCCG | |
| | AGGGCCUGAGAUUCGGCAUCGUGGCCAGCAGGUUCAACC | |
| | ACGCCCUGGUGGACAGACUGGUGGAGGGCGCCAUCGACG | |
| | CCAUCGUGAGACACGGAGGAAGAGAGGAGGAUAUAACAC | |
| | UGGUCAGAGUGCCUGGAUCAUGGGAAAUCCCUGUCGCCG | |
| | CUGGUGAGCUGGCAAGAAAGGAGGACAUCGAUGCGGUGA | |
| | UCGCCAUCGGCGUGCUGAUCCGCGGUGCAACUCCACACUU | |
| | CGACUACAUCGCCUCUGAAGUGUCAAAGGGCCUUGCGGA | |
| | CCUGUCCCUCGAACUCAGAAAGCCUAUCACAUUCGGAGU | |
| | GAUUACUGCAGAUACCCUGGAGCAGGCCAUCGAGAGAGC | |
| | CGGCACCAAGCACGGCAACAAGGGCUGGGAAGCCGCGCU | |
| | GUCUGCCAUAGAAAUGGCAAACCUUUUCAAGUCCCUUAG | |
| | A | |
| 3′UTR | UGAUAAUAGGCUGGAGCCUCGGUGGCCUAGCUUCUUGCC | 106 |
| | CCUUGGGCCUCCCCCCAGCCCCUCCUCCCCUUCCUGCACC | |
| | CGUACCCCCGUGGUCUUUGAAUAAAGUCUGAGUGGGCGG | |
| | C | |
| Corresponding | MDSKGSSQKGSRLLLLLVVSNLLLPQGVVGEAALLVCQYTIQ | 113 |
| amino acid | SLIHLTGEDPGFFNVEIPEFPFYPTCNVCTADVNVTINFDVGGK | |
| sequence | KHQLDLDFGQLTPHTKAVYQPRGAFGGSENATNLFLLELLGA | |
| | GELALTMRSKKLPINVTTGEEQQVSLESVDVYFQDVFGTMWC | |
| | HHAEMQNPVYLIPETVPYIKWDNCNSTNITAVVRAQGLDVTL | |
| | PLSLPTSAQDSNFSVKTEMLGNEIDIECIMEDGEISQVLPGDNK | |
| | FNITCSGYESHVPSGGILTSTSPVATPIPGTGYAYSLRLTPRPVS | |
| | RFLGNNSILYVFYSGNGPKASGGDYCIQSNIVFSDEIPASQDMP | |
| | TNTTDITYVGDNATYSVPMVTSEDANSPNVTVTAFWAWPNN | |
| | TETDFKCKWTLTSGTPSGCENISGAFASNRTFDITVSGLGTAPK | |
| | TLIITRTATNATTTTHKVIFSKAPGSGSAGSGSAGSGSAGSGSA | |
| | MQIYEGKLTAEGLRFGIVASRFNHALVDRLVEGAIDAIVRHGG | |
| | REEDITLVRVPGSWEIPVAAGELARKEDIDAVIAIGVLIRGATP | |
| | HFDYIASEVSKGLADLSLELRKPITFGVITADTLEQAIERAGTK | |
| | HGNKGWEAALSAIEMANLFKSLR | |
| PolyA tail | 100 nt | |

EBV gp350_004 (modified)

| SEQ ID NO: 207 consists of from 5′ end to 3′ end: | | 207 |
|---|---|---|
| 5′ UTR SEQ ID NO: 1, mRNA ORF SEQ ID NO: 124, and | | |
| 3′ UTR SEQ ID NO: 3 | | |
| Chemistry | 1-methylpseudouridine | |
| Cap | 7mG(5′)ppp(5′)NlmpNp | |
| 5′ UTR | GGGAAAUAAGAGAGAAAAGAAGAGUAAGAAGAAAUAUA | 1 |
| | AGAGCCACC | |
| ORF of mRNA | AUGGAAGCCGCCCUAUUAGUCUGCCAGUACACCAUUCAA | 124 |
| Construct | AGCCUCAUCCACUUGACUGGGGAGGAUCCUGGGUUCUUU | |
| (excluding | AACGUGGAAAUCCCGGAAUUCCCUUUCUACCCAACUUGC | |
| the stop | AACGUGUGCACGGCUGACGUCAACGUGACUAUCAACUUC | |
| codon) | GAUGUGGGAGGGAAGAAACAUCAACUUGAUCUGGACUUU | |
| | GGCCAGCUUACUCCCCACACCAAGGCCGUGUACCAGCCCC | |
| | GCGGCGCAUUCGGUGGGAGCGAGAACGCGACAAAUCUAU | |
| | UCUUGCUGGAACUGCUGGGCGCAGGAGAGCUCGCCCUGA | |
| | CGAUGCGAUCUAAGAAGCUUCCCAUCAACGUUACCACUG | |
| | GCGAGGAGCAGCAGGUGUCCCUCGAAAGCGUCGACGUCU | |
| | AUUUCCAAGACGUCUUCGGAACAAUGUGGUGCCACCACG | |
| | CUGAGAUGCAGAACCCCGUAUAUCUUAUUCCCGAAACCG | |
| | UGCCAUACAUCAAGUGGGACAACUGCAACUCAACUAACA | |
| | UCACUGCAGUAGUGCGCGCCCAGGGACUGGACGUCACUU | |
| | UGCCACUGUCACUGCCCACAUCAGCCCAAGACAGCAACUU | |
| | CAGCGUCAAGACAGAAAUGCUGGGCAACGAAAUCGACAU | |
| | CGAAUGCAUAAUGGAGGAUGGGGAAAUUUCCCAGGUCCU | |
| | CCCCGGUGAUAACAAGUUUAAUAUUACUUGUUCUGGAUA | |
| | UGAAUCCCAUGUGCCGUCUGGUGGUAUACUGACGAGUAC | |
| | AUCGCCAGUGGCUACCCCAAUCCCCGGGACAGGCUAUGCC | |
| | UACAGCCUGAGACUGACGCCAAGACCAGUUUCCAGGUUU | |
| | CUGGGGAAUAACUCUAUCCUGUAUGUGUUUUAUUCUGGU | |
| | AACGGACCCAAGGCAUCCGGCGGUGAUUAUUGUAUCCAG | |
| | AGCAAUAUAGUGUUCUCUGAUGAGAUUCCGGCCUCCCAG | |
| | GAUAUGCCAACCAACACGACAGAUAUCACCUAUGUCGGG | |
| | GACAACGCCACAUAUAGCGUGCCAAUGGUGACCAGCGAA | |
| | GAUGCCAAUUCUCCCAACGUCACAGUGACAGCCUUUUGG | |
| | GCGUGGCCUAAUAACACAGAAACUGACUUUAAAUGCAAA | |
| | UGGACUCUAACCUCAGGCACCCCAUCUGGCUGCGAGAAC | |
| | AUAAGCGGCGCGUUUGCAUCGAACAGAACUUUUGAUAUU | |
| | ACAGUAUCUGGGUUGGGCACUGCGCCCAAGACUCUAAUA | |
| | AUUACACGGACGGCCACUAACGCCACCACGACGACUCACA | |
| | AGGUGAUCUUCAGCAAAGCUCCCGAAUCUACUACUACCU | |
| | CGCCGACACUGAAUACGACAGGAUUCGCCGACCCAAAUA | |
| | CUACGACCGGCCUUCCCAGCUCGACACAUGUGCCUACAAA | |
| | CUUAACGGCGCCCGCCAGUACCGGCCCCACCGUGAGCACC | |
| | GCUGACGUCACCUCUCCUACCCCUGCCGGGACUACAAGUG | |
| | GUGCUUCCCCAGUUACUCCCAGCCCUAGCCCUUGGGACAA | |
| | CGGCACUGAGAGCAAAGCUCCGGACAUGACCAGCAGUAC | |
| | CAGUCCAGUGACAACUCCGACACCCAAUGCGACGUCCCCA | |
| | ACUCCCGCCGUGACCACGCCAACACCAAAUGCCACGUCAC | |
| | CUACUCCAGCGGUCACCACCCCAACGCCAAACGCUACUAG | |
| | UCCCACUCUAGGCAAGACAUCUCCCACCUCCGCUGUCACC | |
| | ACCCCUACACCCAAUGCUACCGGUCCCACGGUGGGUGAGA | |
| | CUAGCCCACAGGCCAACGCAACUAAUCAUACAUUGGGUG | |
| | GCACAAGCCCAACGCCCGUCGUCACUAGCCAGCCUAAGAA | |
| | CGCCACAAGCGCUGUAACUACCGGCCAGCACAAUAUAAC | |
| | AAGUUCCAGUACUAGCAGUAUGUCUCUGAGACCCAGCUC | |
| | AAAUCCUGAAACCCUCUCGCCCUCUACGUCGGAUAACUCC | |
| | ACGUCCCACAUGCCUCUACUCACAAGCGCGCACCCUACCG | |
| | GAGGAGAGAAUAUCACUCAGGUUACCCCAGCUUCUAUCU | |
| | CGACUCACCAUGUCUCUACUUCUUCCCCAGCGCCACGGCC | |
| | CGGCACUACCAGCCAGGCUAGCGGGCCAGGUAAUUCCUCC | |
| | ACUAGCACUAAACCUGGCGAAGUCAACGUUACCAAGGGA | |
| | ACACCUCCCCAGAAUGCAACCUCGCCCCAAGCUCCCUCUG | |
| | GACAGAAGACAGCCGUCCCUACCGUCACAAGCACCGGUG | |
| | GGAAGGCGAAUUCUACGACAGGCGGGAAGCACACUACCG | |
| | GACACGGAGCAAGGACAUCCACUGAGCCCACGACCGACU | |
| | ACGGUGGCGACUCCACCACGCCCAGACCCAGGUACAAUGC | |
| | GACUACCUACCUGCCGCCUUCCACUUCCAGCAAACUGAGG | |
| | CCUCGUUGGACUUUCACUUCUCCACCAGUCACCACCGCUC | |
| | AGGCUACCGUGCCUGUCCCGCCGACCUCUCAGCCCCGGUU | |
| | UUCAAAUUUGAGUAUGCUCGUGCUGCAGUGGGCCAGCCU | |
| | GGCAGUGCUUACCCUCCUGCUCUUGCUGGUUAUGGCUGA | |
| | CUGCGCCUUCCGACGUAACUUAUCCACCAGUCAUACUUAC | |
| | ACUACACCUCCUUAUGACGACGCGGAGACCUACGUG | |
| 3′ UTR | UGAUAAUAGGCUGGAGCCUCGGUGGCCAUGCUUCUUGCC | 3 |
| | CCUUGGGCCUCCCCCCAGCCCCUCCUCCCCUUCCUGCACC | |
| | CGUACCCCCGUGGUCUUUGAAUAAAGUCUGAGUGGGCGG | |
| | C | |
| Corresponding | MEAALLVCQYTIQSLIHLTGEDPGFFNVEIPEFPFYPTCNVCTA | 125 |
| amino acid | DVNVTINFDVGGKKHQLDLDFGQLTPHTKAVYQPRGAFGGS | |
| sequence | ENATNLFLLELLGAGELALTMRSKKLPINVTTGEEQQVSLESV | |
| | DVYFQDVFGTMWCHHAEMQNPVYLIPETVPYIKWDNCNSTN | |
| | ITAVVRAQGLDVTLPLSLPTSAQDSNFSVKTEMLGNEIDIECIM | |
| | EDGEISQVLPGDNKFNITCSGYESHVPSGGILTSTSPVATPIPGT | |
| | GYAYSLRLTPRPVSRFLGNNSILYVFYSGNGPKASGGDYCIQS | |
| | NIVFSDEIPASQDMPTNTTDITYVGDNATYSVPMVTSEDANSP | |
| | NVTVTAFWAWPNNTETDFKCKWTLTSGTPSGCENISGAFASN | |
| | RTFDITVSGLGTAPKTLIITRTATNATTTTHKVIFSKAPESTTTS | |
| | PTLNTTGFADPNTTTGLPSSTHVPTNLTAPASTGPTVSTADVTS | |
| | PTPAGTTSGASPVTPSPSPWDNGTESKAPDMTSSTSPVTTPTPN | |
| | ATSPTPAVTTPTPNATSPTPAVTTPTPNATSPTLGKTSPTSAVT | |
| | TPTPNATGPTVGETSPQANATNHTLGGTSPTPVVTSQPKNATS | |
| | AVTTGQHNITSSSTSSMSLRPSSNPETLSPSTSDNSTSHMPLLTS | |
| | AHPTGGENITQVTPASISTHHVSTSSPAPRPGTTSQASGPGNSS | |
| | TSTKPGEVNVTKGTPPQNATSPQAPSGQKTAVPTVTSTGGKA | |
| | NSTTGGKHTTGHGARTSTEPTTDYGGDSTTPRPRYNATTYLPP | |
| | STSSKLRPRWTFTSPPVTTAQATVPVPPTSQPRFSNLSMLVLQ | |
| | WASLAVLTLLLLLVMADCAFRRNLSTSHTYTTPPYDDAETYV | |
| PolyA tail | 100 nt | |

EBV gp350_005 (modified)

| SEQ ID NO: 208 consists of from 5′ end to 3′ end: | | 208 |
|---|---|---|
| 5′ UTR SEQ ID NO: 1, mRNA ORF SEQ ID NO: 126, and | | |
| 3′ UTR SEQ ID NO: 3 | | |
| Chemistry | 1-methylpseudouridine | |
| Cap | 7mG(5′)ppp(5′)NlmpNp | |
| 5′ UTR | GGGAAAUAAGAGAGAAAAGAAGAGUAAGAAGAAAUAUA | 1 |
| | AGAGCCACC | |
| ORF of mRNA | AUGGAAGCCGCCUUACUGGUCUGCCAGUACACUAUUCAG | 126 |
| Construct | UCCCUCAUCCAUCUCACAGGCGAGGACCCGGGGUUCUUCA | |
| (excluding | ACGUCGAAAUCCCCGAAUUCCCAUUCUAUCCCACCUGUAA | |
| the stop | CGUCUGCACAGCCGACGUUAACGUUACAAUCAAUUUCGA | |
| codon) | CGUGGGCGGGAAGAAACACCAGCUGGACCUCGACUUUGG | |
| | GCAGCUGACGCCCCACACUAAAGCCGUUUACCAGCCCAGG | |
| | GGUGCAUUCGGUGGAUCUGAGAAUGCUACAAACCUCUUU | |
| | CUGCUUGAGCUGCUUGGUGCUGGAGAGCUGGCCCUGACA | |
| | AUGCGCAGCAAGAAGUUGCCAAUCAAUGUGACCACAGGU | |
| | GAAGAACAGCAGGUGUCCCUAGAAUCCGUGGAUGUGUAC | |
| | UUCCAGGACGUUUUCGGCACAAUGUGGUGCCAUCACGCA | |
| | GAGAUGCAGAAUCCGGUGUACCUUAUCCCCGAAACAGUG | |
| | CCGUACAUUAAAUGGGAUAAUUGUAACUCCACAAACAUC | |
| | ACGGCAGUGGUGCGCGCUCAGGGGCUGGACGUGACACUC | |
| | CCGCUUUCCUUACCAACAAGUGCUCAAGAUUCCAACUUU | |
| | UCUGUGAAGACCGAGAUGCUGGGCAACGAGAUUGAUAUU | |
| | GAAUGCAUCAUGGAGGAUGGCGAGAUUAGCCAGGUGUUG | |
| | CCCGGCGACAAUAAAUUUAAUAUUACCUGUUCCGGCUAU | |
| | GAGUCACACGUGCCAAGUGGAGGCAUUCUCACGAGCACC | |
| | UCUCCCGUUGCAACACCCAUUCCUGGGACAGGGUACGCA | |
| | UAUAGUCUCAGGCUGACACCGAGACCGGUAUCGCGCUUC | |
| | UUAGGUAACAAUUCCAUCUUGUAUGUGUUUUACAGCGGA | |
| | AACGGGCCAAAGGCCUCAGGAGGAGACUACUGCAUCCAG | |
| | AGCAAUAUAGUCUUUAGCGACGAGAUCCCUGCCUCACAA | |
| | GACAUGCCCACCAACACCACCGACAUCACGUACGUCGGUG | |
| | AUAAUGCCACUUACAGCGUGCCUAUGGUGACCUCUGAAG | |
| | ACGCAAAUUCACCCAAUGUCACGGUUACCGCAUUCUGGG | |
| | CUUGGCCAAAUAACACUGAAACCGACUUCAAGUGUAAAU | |
| | GGACCCUAACCAGCGGCACCCCAUCAGGGUGCGAGAAUA | |
| | UCAGCGGGGCCUUCGCCAGCAACCGGACAUUCGACAUCAC | |
| | CGUGUCAGGACUAGGGACUGCUCCAAAGACAUUAAUUAU | |
| | UACACGGACAGCAACUAACGCUACGACUACGACUCACAA | |
| | AGUGAUAUUUAGCAAAGCGCCCGAAUCGACUACUACGAG | |
| | CCCGACCCUAAACACCACCGGUUUCGCCGAUCCCAACACA | |
| | ACUACUGGUCUCCCAUCUUCGACCCAUGUUCCAACGAAUC | |
| | UGACAGCUCCAGCAAGUACGGGGCCCACUGUGAGUACAG | |
| | CCGACGUUACUAGCCCAACUCCCGCGGGUACGACUAGUG | |
| | GCGCGUCUCCAGUGACCCCUUCGCCUUCUCCGUGGGAUAA | |
| | UGGAACCGAGUCAAAGGCUCCUGAUAUGACCAGCUCCAC | |
| | CAGUCCCGUUACAACGCCAACGCCCAAUGCAACGAGUCCA | |
| | ACUCCGGCGGUUACCACUCCGACACCAAACGCCACCUCGC | |
| | CCACGCCUGCAGUUACUACGCCCACCCCUAAUGCUACGUC | |
| | ACCCACUCUGGGAAAGACCUCACCAACCUCUGCCGUGACU | |
| | ACUCCUACACCUAAUGCCACAGGACCCACAGUUGGGGAA | |
| | ACCAGCCCACAGGCUAACGCAACUAAUCAUACGCUUGGC | |
| | GGGACCUCUCCCACGCCCGUGGUCACUUCACAGCCUAAGA | |
| | AUGCCACAAGCGCUGUGACUACAGGCCAGCAUAAUAUAA | |
| | CCAGCAGUUCAACCAGUAGCAUGUCCCUGCGUCCUUCAUC | |
| | CAAUCCUGAGACUCUGAGCCCCAGCACUAGUGACAACUC | |
| | AACUUCUCACAUGCCGUUGCUGACCUCCGCGCAUCCCACG | |
| | GGCGGUGAGAAUAUCACACAGGUGACACCCGCGUCUAUU | |
| | AGCACACAUCACGUGAGUACGUCCUCGCCCGCACCCCGCC | |
| | CAGGCACAACCUCACAAGCAUCAGGUCCGGGGAAUAGCA | |
| | GCACAAGUACCAAGCCUGGCGAAGUGAAUGUAACCAAGG | |
| | GCACGCCACCGCAGAACGCCACAUCCCCUCAAGCCCCAUC | |
| | CGGCCAGAAGACCGCUGUACCCACCGUGACAUCAACUGG | |
| | GGGGAAAGCGAACUCAACUACCGGUGGGAAGCAUACAAC | |
| | AGGGCACGGUGCCAGAACUUCUACAGAGCCAACCACGGA | |
| | CUACGGAGGGGACAGCACAACGCCCAGACCGCGGUACAA | |
| | UGCGACCACAUACCUGCCUCCCUCAACUUCGAGUAAGCUG | |
| | CGACCCAGAUGGACCUUUACUUCUCCUCCUGUCACCACCG | |
| | CUCAAGCCACCGUCCCGGUUCCACCUACUUCCCAGCCUAG | |
| | AUUCUCCAAUCUGAGCAUGCUUGUCCUACAGUGGGCAUC | |
| | ACUCGCGGUACUAACCUUGCUGCUACUGUUGGUGAUGGC | |
| | GGACUGCGCGUUUCGCCGCAACUUAUCCACCUCCCACACG | |
| | UACACAACACCUCCCUAUGAUGACGCUGAGACUUACGUC | |
| 3′ UTR | UGAUAAUAGGCUGGAGCCUCGGUGGCCAUGCUUCUUGCC | 3 |
| | CCUUGGGCCUCCCCCCAGCCCCUCCUCCCCUUCCUGCACC | |
| | CGUACCCCCGUGGUCUUUGAAUAAAGUCUGAGUGGGCGG | |
| | C | |
| Corresponding | MEAALLVCQYTIQSLIHLTGEDPGFFNVEIPEFPFYPTCNVCTA | 127 |
| amino acid | DVNVTINFDVGGKKHQLDLDFGQLTPHTKAVYQPRGAFGGS | |
| sequence | ENATNLFLLELLGAGELALTMRSKKLPINVTTGEEQQVSLESV | |
| | DVYFQDVFGTMWCHHAEMQNPVYLIPETVPYIKWDNCNSTN | |
| | ITAVVRAQGLDVTLPLSLPTSAQDSNFSVKTEMLGNEIDIECIM | |
| | EDGEISQVLPGDNKFNITCSGYESHVPSGGILTSTSPVATPIPGT | |
| | GYAYSLRLTPRPVSRFLGNNSILYVFYSGNGPKASGGDYCIQS | |
| | NIVFSDEIPASQDMPTNTTDITYVGDNATYSVPMVTSEDANSP | |
| | NVTVTAFWAWPNNTETDFKCKWTLTSGTPSGCENISGAFASN | |
| | RTFDITVSGLGTAPKTLIITRTATNATTTTHKVIFSKAPESTTTS | |
| | PTLNTTGFADPNTTTGLPSSTHVPTNLTAPASTGPTVSTADVTS | |
| | PTPAGTTSGASPVTPSPSPWDNGTESKAPDMTSSTSPVTTPTPN | |
| | ATSPTPAVTTPTPNATSPTPAVTTPTPNATSPTLGKTSPTSAVT | |
| | TPTPNATGPTVGETSPQANATNHTLGGTSPTPVVTSQPKNATS | |
| | AVTTGQHNITSSSTSSMSLRPSSNPETLSPSTSDNSTSHMPLLTS | |
| | AHPTGGENITQVTPASISTHHVSTSSPAPRPGTTSQASGPGNSS | |
| | TSTKPGEVNVTKGTPPQNATSPQAPSGQKTAVPTVTSTGGKA | |
| | NSTTGGKHTTGHGARTSTEPTTDYGGDSTTPRPRYNATTYLPP | |
| | STSSKLRPRWTFTSPPVTTAQATVPVPPTSQPRFSNLSMLVLQ | |
| | WASLAVLTLLLLLVMADCAFRRNLSTSHTYTTPPYDDAETYV | |
| PolyA tail | 100 nt | |

SE_EBV gB_019

| SEQ ID NO: 209 consists of from 5′ end to 3′ end: | | 209 |
|---|---|---|
| 5′ UTR SEQ ID NO: 1, mRNA ORF SEQ ID NO: 128, and | | |
| 3′ UTR SEQ ID NO: 3 | | |
| Chemistry | 1-methylpseudouridine | |
| Cap | 7mG(5′)ppp(5′)NlmpNp | |
| 5′ UTR | GGGAAAUAAGAGAGAAAAGAAGAGUAAGAAGAAAUAUA | 1 |
| | AGAGCCACC | |
| ORF of mRNA | AUGACCCGGCGGCGGGUGUUAAGCGUGGUGGUGCUCUUA | 128 |
| Construct | GCCGCCUUAGCCUGCCGGCUUGGCGCCCAGACUCCGGAGC | |
| (excluding | AGCCCGCUCCUCCCGCCACCACCGUCCAGCCCACCGCCAC | |
| the stop | CCGCCAGCAGACCUCCUUCCCCUUCCGCGUCUGCGAGCUC | |
| codon) | UCCUCCCACGGCGACCUCUUCCGCUUCUCCUCCGACAUCC | |
| | AGUGCCCCUCCUUCGGCACCCGCGAGAACCACACCGAGGG | |
| | CCUCCUCAUGGUCUUCAAGGACAACAUCAUCCCCUACUCC | |
| | UUCAAGGUCCGCUCCUACACCAAGAUCGUCACCAACAUCC | |
| | UCAUCUACAACGGCUGGUACGCCGACUCUGUGACUAAUC | |
| | GCCACGAGGAGAAGUUCUCCGUCGACUCCUACGAGACUG | |
| | ACCAGAUGGACACCAUCUACCAGUGCUACAACGCCGUCA | |
| | AGAUGACCAAGGACGGCCUCACCCGCGUCUACGUCGACCG | |
| | CGACGGCGUCAACAUCACCGUCAACCUCAAGCCUACAGGC | |
| | GGCCUCGCCAACGGCGUCCGCCGCUACGCCUCCCAGACCG | |
| | AGCUCUACGACGCCCCUGGCUGGCUCAUCUGGACCUACCG | |
| | CACCAGGACCACUGUCAAUUGCCUCAUCACCGACAUGAU | |
| | GGCCAAGUCCAACUCCCCUUUCGACUUCUUCGUGACCACC | |
| | ACAGGCCAGACCGUCGAGAUGUCGCCAUUCUAUGACGGC | |
| | AAGAACAAGGAGACUUUCCACGAGAGAGCGGACUCUUUC | |
| | CAUGUCCGCACCAACUACAAGAUUGUCGACUACGACAAC | |
| | CGCGGCACCAAUCCACAGGGCGAGCGCCGCGCCUUCCUCG | |
| | ACAAGGGCACCUACACCCUCUCCUGGAAGCUCGAGAACCG | |
| | CACCGCCUACUGUCCUCUCCAGCACUGGCAGACCUUCGAU | |
| | UCCACCAUCGCCACCGAGACUGGCAAGUCCAUCCAUUUCG | |
| | UCACCGACGAAGGAACAUCUUCAUUCGUCACAAAUACAA | |
| | CCGUGGGCAUCGAGCUCCCCGACGCCUUCAAGUGCAUCGA | |
| | GGAGCAGGUCAACAAGACCAUGCACGAGAAGUACGAGGC | |
| | CGUCCAGGACCGGUAUACAAAGGGCCAGGAGGCCAUCAC | |
| | CUACUUCAUCACCAGCGGAGGUCUGCUUCUCGCCUGGCU | |
| | UCCACUCACACCUCGCUCCCUGGCCACAGUGAAGAACCUC | |
| | ACUGAGUUGACCACCCCAACAAGUUCCCCACCUAGUAGUC | |
| | CUAGCCCUCCUGCUCCUUCCGCCGCCCGCGGCUCCACGCC | |
| | UGCCGCCGUCCUGCGGAGACGGAGAAGGGACGCCGGCAA | |
| | CGCUACCACUCCUGUGCCGCCGACAGCCCCUGGAAAGUCC | |
| | CUAGGUACCCUCAACAACCCAGCGACAGUUCAGAUCCAG | |
| | UUCGCCUACGACUCUCUCAGGCGCCAGAUCAACCGCAUGC | |
| | UUGGUGACCUUGCCCGCGCCUGGUGCCUCGAGCAGAAGC | |
| | GCCAGAACAUGGUGCUUCGUGAACUAACAAAGAUUAAUC | |
| | CUACUACAGUGAUGUCCUCCAUCUACGGCAAGGCCGUCG | |
| | CCGCCAAGCGCCUCGGCGACGUCAUCUCCGUCUCCCAGUG | |
| | CGUCCCAGUGAACCAGGCUACCGUGACCCUCAGGAAGUCC | |
| | AUGAGAGUGCCAGGCUCCGAGACAAUGUGCUACUCCCGC | |
| | CCACUCGUCUCCUUCUCCUUCAUCAACGACACAAAGACCU | |
| | ACGAGGGCCAGUUAGGCACUGACAACGAGAUCUUCUUGA | |
| | CUAAGAAGAUGACUGAGGUAUGCCAGGCAACUUCUCAAU | |
| | ACUACUUCCAGUCUGGAAAUGAGAUCCACGUAUAUAACG | |
| | ACUACCACCACUUCAAGACUAUUGAACUCGACGGAAUUG | |
| | CCACCCUCCAAACAUUCAUCUCACUGAAUACCUCCCUCAU | |
| | CGAGAACAUCGACUUCGCCUCCCUCGAGCUGUAUAGCAG | |
| | AGACGAGCAGCGCGCCUCCAACGUCUUCGACCUCGAGGGC | |
| | AUCUUCCGCGAGUACAACUUCCAGGCACAGAACAUAGCC | |
| | GGCCUCCGUAAGGAUCUGGACAAUGCCGUGUCCAACGGC | |
| | CGCAACCAGUUCGUCGACGGUUUGGGUGAACUCAUGGAC | |
| | UCUCUGGGCUCCGUCGGCCAGUCCAUAACUAACUUAGUC | |
| | UCUACGGUGGGAGGCCUAUUCAGCAGCCUGGUGAGCGGC | |
| | UUCAUCUCUUUCUUCAAGAACCCCUUCGGCGGCAUGCUC | |
| | AUCCUCGUCCUCGUCGCCGGCGUCGUCAUACUGGUGAUC | |
| | UCACUCACAAGGAGGACGCGCCAAAUGUCCCAGCAGCCA | |
| | GUGCAGAUGCUCUACCCAGGCAUAGACGAGCUCGCUCAG | |
| | CAGCACGCGUCGGGUGAGGGACCAGGCAUCAAUCCUAUC | |
| | UCCAAGACUGAGCUGCAAGCCAUUAUGCUCGCCCUCCACG | |
| | AGCAGAACCAGGAACAGAAGCGGGCCGCCCAGCGAGCUG | |
| | CCGGCCCCUCCGUCGCCAGUAGGGCACUACAAGCCGCCCG | |
| | GGACCGCUUCCCAGGCCUGAGAAGGAGGAGAUACCACGA | |
| | CCCAGAGACAGCCGCUGCCCUCCUUGGCGAAGCAGAAACC | |
| | GAGUUC | |
| 3′ UTR | UGAUAAUAGGCUGGAGCCUCGGUGGCCAUGCUUCUUGCC | 3 |
| | CCUUGGGCCUCCCCCCAGCCCCUCCUCCCCUUCCUGCACC | |
| | CGUACCCCCGUGGUCUUUGAAUAAAGUCUGAGUGGGCGG | |
| | C | |
| Corresponding | MTRRRVLSVVVLLAALACRLGAQTPEQPAPPATTVQPTATRQ | 129 |
| amino acid | QTSFPFRVCELSSHGDLFRFSSDIQCPSFGTRENHTEGLLMVFK | |
| sequence | DNIIPYSFKVRSYTKIVTNILIYNGWYADSVTNRHEEKFSVDSY | |
| | ETDQMDTIYQCYNAVKMTKDGLTRVYVDRDGVNITVNLKPT | |
| | GGLANGVRRYASQTELYDAPGWLIWTYRTRTTVNCLITDMM | |
| | AKSNSPFDFFVTTTGQTVEMSPFYDGKNKETFHERADSFHVR | |
| | TNYKIVDYDNRGTNPQGERRAFLDKGTYTLSWKLENRTAYC | |
| | PLQHWQTFDSTIATETGKSIHFVTDEGTSSFVTNTTVGIELPDA | |
| | FKCIEEQVNKTMHEKYEAVQDRYTKGQEAITYFITSGGLLLA | |
| | WLPLTPRSLATVKNLTELTTPTSSPPSSPSPPAPSAARGSTPAA | |
| | VLRRRRRDAGNATTPVPPTAPGKSLGTLNNPATVQIQFAYDSL | |
| | RRQINRMLGDLARAWCLEQKRQNMVLRELTKINPTTVMSSIY | |
| | GKAVAAKRLGDVISVSQCVPVNQATVTLRKSMRVPGSETMC | |
| | YSRPLVSFSFINDTKTYEGQLGTDNEIFLTKKMTEVCQATSQY | |
| | YFQSGNEIHVYNDYHHFKTIELDGIATLQTFISLNTSLIENIDFA | |
| | SLELYSRDEQRASNVFDLEGIFREYNFQAQNIAGLRKDLDNAV | |
| | SNGRNQFVDGLGELMDSLGSVGQSITNLVSTVGGLFSSLVSGF | |
| | ISFFKNPFGGMLILVLVAGVVILVISLTRRTRQMSQQPVQMLY | |
| | PGIDELAQQHASGEGPGINPISKTELQAIMLALHEQNQEQKRA | |
| | AQRAAGPSVASRALQAARDRFPGLRRRRYHDPETAAALLGE | |
| | AETEF | |
| PolyA tail | 100 nt | |

V3_NGM 6mut CR2_EBV_gp350_001

| SEQ ID NO: 210 consists of from 5′ end to 3′ end: | | 210 |
|---|---|---|
| 5′ UTR SEQ ID NO: 1, mRNA ORF SEQ ID NO: 211, and | | |
| 3′ UTR SEQ ID NO: 3. | | |
| Chemistry | 1-methylpseudouridine | |
| Cap | 7mG(5′)ppp(5′)NlmpNp | |
| 5′ UTR | GGGAAAUAAGAGAGAAAAGAAGAGUAAGAAGAAAUAUA | 1 |
| | AGAGCCACC | |
| ORF of mRNA | AUGGAGGCAGCACUGCUGGUCUGCCAGUAUACAAUCCAG | 211 |
| Construct | UCGCUCAUUCAUCUGACAGGCGAGGACCCCGGCUUCUUU | |
| (excluding | AACGUGGAAAUCCCAGAGUUCCCUUUCUAUCCAACCUGU | |
| the stop | AACGUUUGCACUGCUGACGUGAACGUGACAAUCAAUUUC | |
| codon) | GACGUGGGAGGAAAGAAGCAUCAGCUUGAUCUGGAUUUC | |
| | GGCCAACUGACGCCACACACCAAAGCGGUGUACCAACCAA | |
| | GGGGUGCAUUUGGAGGGAGCGAGAAUGCUGCGAAUCUGU | |
| | UCUUACUGGAACUGCUUGGUGCAGGAGAGCUGGCACUAA | |
| | CCAUGCGAAGCAAGAAGCUCCCCAUCAACGUUACCACCGG | |
| | GGAAGAACAGCAAGUCAGCCUUGAAUCCGUGGAUGUGUA | |
| | CUUUCAGGAUGUUUUCGGCACCAUGUGGUGUCACCACGC | |
| | UGAGAUGCAGAAUCCCGUGUAUCUCAUACCCGAGACUGU | |
| | ACCCUACAUCAAGUGGGAUAAUUGCAAUUCAGCGAAUAU | |
| | UACGGCUGUGGUGAGGGCCCAGGGCUUGGACGUGACUCU | |
| | GCCCUUAUCUCUACCUACUUCUGCCCAAGACUCCAAUUUC | |
| | GCGGUCAAGACCGAGAUGCUCGGGAAUGAGAUCGAUAUC | |
| | GAGUGCAUCAUGGAGGACGGUGAGAUAAGCCAGGUUCUG | |
| | CCCGGCGACAACAAGUUCAAUAUCGCGUGUUCUGGCUAC | |
| | GAGUCCCAUGUGCCUAGUGGUGGCAUACUCACAAGUACU | |
| | UCUCCCGUAGCCACGCCCAUUCCCGGAACCGGAUACGCCU | |
| | ACAGUCUGCGUCUGACCCCACGGCCUGUGUCCAGAUUCCU | |
| | GGGUAACAAUAGUAUCUUAUACGUGUUUUAUAGCGGAAA | |
| | CGGCCCUAAAGCGUCCGGAGGGGACUAUUGUAUUCAGAG | |
| | UAAUAUCGUUUUCUCUGAUGAGAUUCCUGCCAGUCAGGA | |
| | CAUGCCGACAAACACAACUGAUAUUACCUACGUGGGCGA | |
| | CAAUGCCACGUAUUCAGUGCCCAUGGUCACGAGCGAGGA | |
| | CGCCAAUUCACCAAAUGUUGCGGUAACAGCUUUCUGGGC | |
| | CUGGCCAAAUAACACUGAGACUGACUUCAAAUGUAAGUG | |
| | GACUUUGACCUCUGGAACUCCGUCGGGUUGCGAGAAUAU | |
| | CAGCGGGGCCUUUGCUUCCAACAGGACUUUCGACAUCAC | |
| | UGUCUCAGGGCUGGGGACAGCACCGAAGACAUUAAUCAU | |
| | AACACGGACCGCCACCAACGCCGCGACUACAACCCAUAAG | |
| | GUGAUCUUUUCCAAGGCACCUGAGUCCACCACUACCUCCC | |
| | CGACUCUUAACACUACGGGCUUCGCUGAUCCCAACACCAC | |
| | UACGGGGUUGCCUAGCUCGACACAUGUGCCGACGAACCU | |
| | GACUGCCCCUGCAUCGACCGGGCCCACAGUUUCGACCGCC | |
| | GAUGUGACAUCACCAACGCCCGCAGGUACAACCUCAGGC | |
| | GCCAGCCCAGUGACCCCUUCCCCAAGCCCCUGGGAUAAUG | |
| | GAACGGAGUCCAAGGCUCCUGAUAUGACUUCCUCUACCA | |
| | GCCCCGUGACUACACCCACUCCCAACGCAACUAGCCCAAC | |
| | CCCAGCUGUGACGACGCCCACCCCGAACGCGACAUCUCCC | |
| | ACACCUGCUGUGACAACCCCAACCCCUAACGCCACUAGCC | |
| | CUACCCUAGGUAAGACCAGUCCGACUAGCGCCGUUACAA | |
| | CCCCUACCCCUAACGCAACCGGCCCGACCGUGGGCGAGAC | |
| | UUCCCCGCAAGCCAAUGCGACAAAUCACACAUUGGGCGG | |
| | GACCUCUCCUACACCAGUCGUUACAUCUCAGCCUAAGAAC | |
| | GCUACCUCCGCUGUCACUACCGGACAGCACAACAUCACCA | |
| | GCUCAAGCACGAGUUCCAUGAGCUUGCGGCCGAGCUCAA | |
| | AUCCCGAGACCCUAUCACCAUCCACAUCAGACAACAGUAC | |
| | UUCACACAUGCCACUCUUGACGAGCGCUCACCCCACCGGC | |
| | GGCGAGAACAUCACCCAGGUGACUCCGGCGUCUAUUUCC | |
| | ACCCACCACGUCAGCACGUCGUCUCCCGCACCGAGACCAG | |
| | GGACGACUUCUCAGGCCAGUGGGCCUGGCAACUCCUCUA | |
| | CAAGCACAAAGCCAGGCGAAGUUAACGUGACAAAGGGAA | |
| | CGCCUCCCCAGAACGCAACCAGUCCUCAGGCGCCCAGCGG | |
| | GCAGAAGACUGCGGUGCCAACUGUGACCAGCACCGGUGG | |
| | CAAGGCCAACUCAACAACUGGAGGCAAGCAUACGACGGG | |
| | GCACGGCGCCCGGACCUCCACUGAACCCACGACCGAUUAC | |
| | GGAGGUGACAGCACAACACCGCGGCCACGAUAUAAUGCC | |
| | ACCACUUAUCUGCCACCAUCCACAAGCUCCAAGCUGCGGC | |
| | CACGGUGGACCUUCACAAGCCCACCCGUGACGACUGCCCA | |
| | AGCGACGGUGCCAGUGCCACCUACAAGCCAGCCACGCUUC | |
| | UCCAACCUUAGUAUGCUCGUUCUCCAGUGGGCCAGCCUU | |
| | GCUGUUCUGACCCUCCUCCUGCUGCUCGUGAUGGCCGAU | |
| | UGCGCCUUUAGGAGAAACCUCAGCACUAGCCACACGUAC | |
| | ACCACGCCGCCCUACGAUGACGCCGAGACUUACGUC | |
| 3′ UTR | UGAUAAUAGGCUGGAGCCUCGGUGGCCAUGCUUCUUGCC | 3 |
| | CCUUGGGCCUCCCCCCAGCCCCUCCUCCCCUUCCUGCACC | |
| | CGUACCCCCGUGGUCUUUGAAUAAAGUCUGAGUGGGCGG | |
| | C | |
| Corresponding | MEAALLVCQYTIQSLIHLTGEDPGFFNVEIPEFPFYPTCNVCTA | 70 |
| amino acid | DVNVTINFDVGGKKHQLDLDFGQLTPHTKAVYQPRGAFGGS | |
| sequence | ENAANLFLLELLGAGELALTMRSKKLPINVTTGEEQQVSLESV | |
| | DVYFQDVFGTMWCHHAEMQNPVYLIPETVPYIKWDNCNSAN | |
| | ITAVVRAQGLDVTLPLSLPTSAQDSNFAVKTEMLGNEIDIECI | |
| | MEDGEISQVLPGDNKFNIACSGYESHVPSGGILTSTSPVATPIP | |
| | GTGYAYSLRLTPRPVSRFLGNNSILYVFYSGNGPKASGGDYCI | |
| | QSNIVFSDEIPASQDMPTNTTDITYVGDNATYSVPMVTSEDAN | |
| | SPNVAVTAFWAWPNNTETDFKCKWTLTSGTPSGCENISGAFA | |
| | SNRTFDITVSGLGTAPKTLIITRTATNAATTTHKVIFSKAPESTT | |
| | TSPTLNTTGFADPNTTTGLPSSTHVPTNLTAPASTGPTVSTADV | |
| | TSPTPAGTTSGASPVTPSPSPWDNGTESKAPDMTSSTSPVTTPT | |
| | PNATSPTPAVTTPTPNATSPTPAVTTPTPNATSPTLGKTSPTSA | |
| | VTTPTPNATGPTVGETSPQANATNHTLGGTSPTPVVTSQPKNA | |
| | TSAVTTGQHNITSSSTSSMSLRPSSNPETLSPSTSDNSTSHMPLL | |
| | TSAHPTGGENITQVTPASISTHHVSTSSPAPRPGTTSQASGPGN | |
| | SSTSTKPGEVNVTKGTPPQNATSPQAPSGQKTAVPTVTSTGGK | |
| | ANSTTGGKHTTGHGARTSTEPTTDYGGDSTTPRPRYNATTYL | |
| | PPSTSSKLRPRWTFTSPPVTTAQATVPVPPTSQPRFSNLSMLVL | |
| | QWASLAVLTLLLLLVMADCAFRRNLSTSHTYTTPPYDDAETY | |
| | V | |
| PolyA tail | 100 nt | |

EBV Linked Construct 1 (1723942)

| SEQ ID NO: 212 consists of from 5′ end to 3′ end: | | 212 |
|---|---|---|
| 5′ UTR SEQ ID NO: 104, mRNA ORF SEQ ID NO: 213, and | | |
| 3′ UTR SEQ ID NO: 106. | | |
| Chemistry | 1-methylpseudouridine | |
| Cap | 7mG(5′)ppp(5′)NlmpNp | |
| 5′ UTR | GGGAAAUAAGAGAGAAAAGAAGAGUAAGAAGAAAUAUA | 104 |
| | AGACCCCGGCGCCGCCACC | |
| ORF of mRNA | AUGGUGAGCUUCAAGCAGGUGAGAGUGCCCCUGUUCACC | 213 |
| Construct | GCCAUCGCCCUGGUGAUCGUGCUGCUGCUGGCCUACUUCC | |
| (excluding | UGCCACCCAGAGUGAGAGGCGGCGGCAGAGUGGCCGCCG | |
| the stop | CCGCCAUCACCUGGGUGCCCAAGCCCAACGUGGAGGUGU | |
| codon) | GGCCCGUGGACCCGCCACCUCCCGUGAACUUCAACAAGAC | |
| | CGCCGAGCAGGAGUACGGCGACAAGGAGGUGAAGCUGCC | |
| | CCACUGGACGCCGACCCUGCACACCUUCCAGGUGCCCCAG | |
| | AACUACACCAAGGCCAACUGCACCUACUGCAACACCAGAG | |
| | AGUACACCUUCAGCUACAAGGGCUGCUGCUUCUACUUCA | |
| | CCAAGAAGAAGCACACCUGGAACGGCUGCUUCCAGGCCU | |
| | GCGCCGAGCUGUACCCCUGCACCUACUUCUACGGCCCCAC | |
| | CCCAGACAUCCUGCCCGUGGUGACCAGAAACCUGAACGCC | |
| | AUCGAGAGCCUGUGGGUGGGCGUGUACAGAGUGGGCGAG | |
| | GGCAACUGGACCAGCCUGGACGGCGGCACCUUCAAGGUG | |
| | UACCAGAUCUUCGGCAGCCACUGCACCUACGUGAGCAAG | |
| | UUCAGCACCGUGCCCGUGAGCCACCACGAGUGCAGCUUCC | |
| | UGAAGCCCUGCCUGUGCGUGAGCCAGAGAAGCAACAGCG | |
| | GCACUAGCGGCUCUAGCGGAUCAGGCAGCGGAGGGAGUG | |
| | GAGGCUCAGGAGGGACCAGCGGCAGCAGUGGCUCCGGAA | |
| | GCGGAGGCAGCCCCUGCUGCCACGUGACCCAGCUGAGAGC | |
| | CCAGCACCUGCUGGCCCUGGAGAACAUCAGCGACAUCUAC | |
| | CUGGUGAGCAACCAGACCUGCGACGGCUUCAGCCUGGCC | |
| | AGCCUGAACAGCCCCAAGAACGGCAGCAACCAGCUGGUG | |
| | AUCAGCAGAUGCGCCAACGGCCUGAACGUGGUGAGCUUC | |
| | UUCAUCAGCAUCCUGAAGAGAAGCAGCAGCGCCCUGACC | |
| | GGCCACCUGAGAGAGCUGCUGACCACCCUGGAGACCCUG | |
| | UACGGCAGCUUCAGCGUGGAGGACCUGUUCGGCGCCAAC | |
| | CUGAACAGAUACGCCUGGCACAGAGGCGGCGGAGGAGGU | |
| | GGCUCCGGUGGAGGUGGCAGCGGAGGAGGAGGCAGUGGU | |
| | GGCGGAGGCAGCCUUAGCGAGGUGAAGCUCCACUUGGAC | |
| | AUCGAGGGCCACGCCAGCCACUACACCAUCCCCUGGACCG | |
| | AGCUCAUGGCCAAGGUGCCCGGCCUUAGCCCCGAGGCCCU | |
| | GUGGCGGGAGGCCAACGUGACCGAGGACCUGGCCAGCAU | |
| | GCUGAACCGGUACAAGCUGAUCUACAAGACCAGCGGCAC | |
| | CCUGGGCAUCGCCCUGGCCGAGCCCGUGGACAUCCCCGCC | |
| | GUUAGCGAAGGCAGCAUGCAGGUGGACGCCAGCAAGGUG | |
| | CACCCCGGCGUGAUCAGCGGCCUGAACAGCCCCGCCUGUA | |
| | UGUUGAGCGCCCCACUGGAGAAGCAGCUGUUCUACUACA | |
| | UCGGCACCAUGCUGCCCAACACCCGGCCCCACAGCUACGU | |
| | GUUCUACCAGCUGCGGUGCCACCUGAGCUACGUUGCCCU | |
| | GAGCAUCAACGGCGACAAGUUCCAGUACACCGGCGCCAU | |
| | GACCAGCAAGUUCCUGAUGGGCACCUACAAGCGGGUCAC | |
| | CGAGAAGGGCGACGAGCACGUGCUGUCACUGGUGUUCGG | |
| | CAAGACCAAGGACCUGCCCGACCUGCGGGGCCCCUUCAGC | |
| | UACCCUAGUUUGACCAGCGCCCAGAGCGGCGACUACAGC | |
| | UUGGUGAUCGUGACCACCUUCGUGCACUACGCCAACUUC | |
| | CACAACUACUUCGUGCCCAACCUGAAGGACAUGUUCAGC | |
| | CGGGCCGUGACCAUGACUGCCGCUUCUUACGCCCGGUACG | |
| | UGCUGCAGAAGCUGGUCCUGCUGGAGAUGAAGGGCGGCU | |
| | GCCGGGAGCCCGAGCUGGACACCGAAACACUGACCACCAU | |
| | GUUCGAGGUGAGCGUGGCCUUCUUCAAGGUGGGUCACGC | |
| | GGUGGGCGAAACCGGCAACGGCUGCGUGGACUUACGCUG | |
| | GCUGGCCAAGAGCUUCUUCGAGCUGACCGUGCUGAAGGA | |
| | UAUCAUCGGCAUCUGCUACGGCGCCACCGUGAAGGGCAU | |
| | GCAGAGCUACGGCCUGGAGCGGCUGGCCGCCAUGCUUAU | |
| | GGCAACAGUGAAGAUGGAGGAGCUGGGACACCUGACAAC | |
| | AGAGAAGCAGGAGUACGCCCUGAGACUGGCCACAGUGGG | |
| | CUACCCAAAGGCCGGCGUGUACAGUGGACUGAUCGGCGG | |
| | CGCAACCAGCGUGCUGCUAUCCGCUUACAACCGGCACCCG | |
| | CUGUUCCAGCCCCUGCACACCGUGAUGCGGGAAACCCUGU | |
| | UCAUCGGAAGCCACGUCGUGCUGCGGGAGCUGAGGCUGA | |
| | ACGUAACCACCCAGGGCCCUAAUCUGGCCCUGUAUCAGCU | |
| | CCUCAGUACCGCCCUGUGCAGCGCCCUUGAGAUCGGCGAG | |
| | GUGCUCAGAGGCCUGGCCCUCGGUACCGAGAGCGGCCUC | |
| | UUCAGCCCAUGCUACUUAAGCCUGCGGUUCGACCUGACCC | |
| | GGGACAAGUUGCUGAGCAUGGCCCCGCAGGAGGCCACAC | |
| | UGGACCAGGCAGCUGUAUCCAACGCCGUGGACGGCUUCC | |
| | UGGGCAGACUGUCCCUGGAACGGGAGGACCGGGACGCCU | |
| | GGCACCUGCCUGCCUACAAGUGUGUGGAUCGGCUGGACA | |
| | AGGUGCUGAUGAUCAUCCCUCUGAUUAAUGUCACCUUCA | |
| | UCAUCAGCAGCGACCGGGAGGUGCGGGGAUCCGCCCUCU | |
| | ACGAGGCCAGCACCACCUAUCUGAGCAGCAGCCUGUUCCU | |
| | GUCUCCUGUGAUCAUGAACAAGUGCAGCCAGGGCGCCGU | |
| | GGCCGGCGAGCCCCGGCAGAUCCCCAAGAUCCAGAACUUC | |
| | ACCCGGACCCAGAAGUCUUGCAUCUUCUGCGGCUUCGCCC | |
| | UUUUGUCCUACGACGAGAAGGAGGGCUUGGAGACUACAA | |
| | CCUACAUCACCAGCCAGGAGGUGCAGAACAGCAUCCUGU | |
| | CAUCUAAUUACUUCGACUUCGACAACCUGCACGUUCAUU | |
| | ACCUGCUCCUCACCACCAACGGUACCGUCAUGGAAAUCGC | |
| | CGGACUGUACGAGGAGCGGGCCCAUGUUGUGCUGGCCAU | |
| | CAUCCUGUACUUCAUCGCUUUCGCACUUGGCAUCUUCCU | |
| | GGUGCACAAGAUCGUGAUGUUCUUCCUG | |
| 3′ UTR | UGAUAAUAGGCUGGAGCCUCGGUGGCCUAGCUUCUUGCC | 106 |
| | CCUUGGGCCUCCCCCCAGCCCCUCCUCCCCUUCCUGCACC | |
| | CGUACCCCCGUGGUCUUUGAAUAAAGUCUGAGUGGGCGG | |
| | C | |
| Corresponding | MVSFKQVRVPLFTAIALVIVLLLAYFLPPRVRGGGRVAAAAIT | 214 |
| amino acid | WVPKPNVEVWPVDPPPPVNFNKTAEQEYGDKEVKLPHWTPT | |
| sequence | LHTFQVPQNYTKANCTYCNTREYTFSYKGCCFYFTKKKHTW | |
| | NGCFQACAELYPCTYFYGPTPDILPVVTRNLNAIESLWVGVYR | |
| | VGEGNWTSLDGGTFKVYQIFGSHCTYVSKFSTVPVSHHECSFL | |
| | KPCLCVSQRSNSGTSGSSGSGSGGSGGSGGTSGSSGSGSGGSP | |
| | CCHVTQLRAQHLLALENISDIYLVSNQTCDGFSLASLNSPKNG | |
| | SNQLVISRCANGLNVVSFFISILKRSSSALTGHLRELLTTLETLY | |
| | GSFSVEDLFGANLNRYAWHRGGGGGGSGGGGSGGGGSGGG | |
| | GSLSEVKLHLDIEGHASHYTIPWTELMAKVPGLSPEALWREA | |
| | NVTEDLASMLNRYKLIYKTSGTLGIALAEPVDIPAVSEGSMQV | |
| | DASKVHPGVISGLNSPACMLSAPLEKQLFYYIGTMLPNTRPHS | |
| | YVFYQLRCHLSYVALSINGDKFQYTGAMTSKFLMGTYKRVT | |
| | EKGDEHVLSLVFGKTKDLPDLRGPFSYPSLTSAQSGDYSLVIV | |
| | TTFVHYANFHNYFVPNLKDMFSRAVTMTAASYARYVLQKLV | |
| | LLEMKGGCREPELDTETLTTMFEVSVAFFKVGHAVGETGNGC | |
| | VDLRWLAKSFFELTVLKDIIGICYGATVKGMQSYGLERLAAM | |
| | LMATVKMEELGHLTTEKQEYALRLATVGYPKAGVYSGLIGG | |
| | ATSVLLSAYNRHPLFQPLHTVMRETLFIGSHVVLRELRLNVTT | |
| | QGPNLALYQLLSTALCSALEIGEVLRGLALGTESGLFSPCYLSL | |
| | RFDLTRDKLLSMAPQEATLDQAAVSNAVDGFLGRLSLEREDR | |
| | DAWHLPAYKCVDRLDKVLMIIPLINVTFIISSDREVRGSALYE | |
| | ASTTYLSSSLFLSPVIMNKCSQGAVAGEPRQIPKIQNFTRTQKS | |
| | CIFCGFALLSYDEKEGLETTTYITSQEVQNSILSSNYFDFDNLH | |
| | VHYLLLTTNGTVMEIAGLYEERAHVVLAIILYFIAFALGIFLVH | |
| | KIVMFFL | |
| PolyA tail | 100 nt | |

EBV Linked Construct 2 (1723941)

| SEQ ID NO: 215 consists of from 5′ end to 3′ end: | | 215 |
|---|---|---|
| 5′ UTR SEQ ID NO: 104, mRNA ORF SEQ ID NO: 216, and | | |
| 3′ UTR SEQ ID NO: 106. | | |
| Chemistry | 1-methylpseudouridine | |
| Cap | 7mG(5′)ppp(5′)NlmpNp | |
| 5′ UTR | GGGAAAUAAGAGAGAAAAGAAGAGUAAGAAGAAAUAUA | 104 |
| | AGACCCCGGCGCCGCCACC | |
| ORF of mRNA | AUGGUGAGCUUCAAGCAGGUGAGAGUGCCCCUGUUCACC | 216 |
| Construct | GCCAUCGCCCUGGUGAUCGUGCUGCUGCUGGCCUACUUCC | |
| (excluding | UGCCACCCAGAGUGAGAGGCGGCGGCAGAGUGGCCGCCG | |
| the stop | CCGCCAUCACCUGGGUGCCCAAGCCCAACGUGGAGGUGU | |
| codon) | GGCCCGUGGACCCGCCACCUCCCGUGAACUUCAACAAGAC | |
| | CGCCGAGCAGGAGUACGGCGACAAGGAGGUGAAGCUGCC | |
| | CCACUGGACGCCGACCCUGCACACCUUCCAGGUGCCCCAG | |
| | AACUACACCAAGGCCAACUGCACCUACUGCAACACCAGAG | |
| | AGUACACCUUCAGCUACAAGGGCUGCUGCUUCUACUUCA | |
| | CCAAGAAGAAGCACACCUGGAACGGCUGCUUCCAGGCCU | |
| | GCGCCGAGCUGUACCCCUGCACCUACUUCUACGGCCCCAC | |
| | CCCAGACAUCCUGCCCGUGGUGACCAGAAACCUGAACGCC | |
| | AUCGAGAGCCUGUGGGUGGGCGUGUACAGAGUGGGCGAG | |
| | GGCAACUGGACCAGCCUGGACGGCGGCACCUUCAAGGUG | |
| | UACCAGAUCUUCGGCAGCCACUGCACCUACGUGAGCAAG | |
| | UUCAGCACCGUGCCCGUGAGCCACCACGAGUGCAGCUUCC | |
| | UGAAGCCCUGCCUGUGCGUGAGCCAGAGAAGCAACAGCG | |
| | GAGGAGGAGGAUCUGGAGGCGGCGGAAGUGGUGGAGGAG | |
| | GAAGCGGAGGAGGUGGCAGCGGAGGUGGUGGAAGUGGCG | |
| | GCGGAGGAAGCCCCUGCUGCCACGUGACCCAGCUGAGAG | |
| | CCCAGCACCUGCUGGCCCUGGAGAACAUCAGCGACAUCUA | |
| | CCUGGUGAGCAACCAGACCUGCGACGGCUUCAGCCUGGCC | |
| | AGCCUGAACAGCCCCAAGAACGGCAGCAACCAGCUGGUG | |
| | AUCAGCAGAUGCGCCAACGGCCUGAACGUGGUGAGCUUC | |
| | UUCAUCAGCAUCCUGAAGAGAAGCAGCAGCGCCCUGACC | |
| | GGCCACCUGAGAGAGCUGCUGACCACCCUGGAGACCCUG | |
| | UACGGCAGCUUCAGCGUGGAGGACCUGUUCGGCGCCAAC | |
| | CUGAACAGAUACGCCUGGCACAGAGGCGGCGGAGGAGGU | |
| | GGCUCCGGUGGAGGUGGCAGCGGAGGAGGAGGCAGUGGU | |
| | GGCGGAGGCAGCCUUAGCGAGGUGAAGCUCCACUUGGAC | |
| | AUCGAGGGCCACGCCAGCCACUACACCAUCCCCUGGACCG | |
| | AGCUCAUGGCCAAGGUGCCCGGCCUUAGCCCCGAGGCCCU | |
| | GUGGCGGGAGGCCAACGUGACCGAGGACCUGGCCAGCAU | |
| | GCUGAACCGGUACAAGCUGAUCUACAAGACCAGCGGCAC | |
| | CCUGGGCAUCGCCCUGGCCGAGCCCGUGGACAUCCCCGCC | |
| | GUUAGCGAAGGCAGCAUGCAGGUGGACGCCAGCAAGGUG | |
| | CACCCCGGCGUGAUCAGCGGCCUGAACAGCCCCGCCUGUA | |
| | UGUUGAGCGCCCCACUGGAGAAGCAGCUGUUCUACUACA | |
| | UCGGCACCAUGCUGCCCAACACCCGGCCCCACAGCUACGU | |
| | GUUCUACCAGCUGCGGUGCCACCUGAGCUACGUUGCCCU | |
| | GAGCAUCAACGGCGACAAGUUCCAGUACACCGGCGCCAU | |
| | GACCAGCAAGUUCCUGAUGGGCACCUACAAGCGGGUCAC | |
| | CGAGAAGGGCGACGAGCACGUGCUGUCACUGGUGUUCGG | |
| | CAAGACCAAGGACCUGCCCGACCUGCGGGGCCCCUUCAGC | |
| | UACCCUAGUUUGACCAGCGCCCAGAGCGGCGACUACAGC | |
| | UUGGUGAUCGUGACCACCUUCGUGCACUACGCCAACUUC | |
| | CACAACUACUUCGUGCCCAACCUGAAGGACAUGUUCAGC | |
| | CGGGCCGUGACCAUGACUGCCGCUUCUUACGCCCGGUACG | |
| | UGCUGCAGAAGCUGGUCCUGCUGGAGAUGAAGGGCGGCU | |
| | GCCGGGAGCCCGAGCUGGACACCGAAACACUGACCACCAU | |
| | GUUCGAGGUGAGCGUGGCCUUCUUCAAGGUGGGUCACGC | |
| | GGUGGGCGAAACCGGCAACGGCUGCGUGGACUUACGCUG | |
| | GCUGGCCAAGAGCUUCUUCGAGCUGACCGUGCUGAAGGA | |
| | UAUCAUCGGCAUCUGCUACGGCGCCACCGUGAAGGGCAU | |
| | GCAGAGCUACGGCCUGGAGCGGCUGGCCGCCAUGCUUAU | |
| | GGCAACAGUGAAGAUGGAGGAGCUGGGACACCUGACAAC | |
| | AGAGAAGCAGGAGUACGCCCUGAGACUGGCCACAGUGGG | |
| | CUACCCAAAGGCCGGCGUGUACAGUGGACUGAUCGGCGG | |
| | CGCAACCAGCGUGCUGCUAUCCGCUUACAACCGGCACCCG | |
| | CUGUUCCAGCCCCUGCACACCGUGAUGCGGGAAACCCUGU | |
| | UCAUCGGAAGCCACGUCGUGCUGCGGGAGCUGAGGCUGA | |
| | ACGUAACCACCCAGGGCCCUAAUCUGGCCCUGUAUCAGCU | |
| | CCUCAGUACCGCCCUGUGCAGCGCCCUUGAGAUCGGCGAG | |
| | GUGCUCAGAGGCCUGGCCCUCGGUACCGAGAGCGGCCUC | |
| | UUCAGCCCAUGCUACUUAAGCCUGCGGUUCGACCUGACCC | |
| | GGGACAAGUUGCUGAGCAUGGCCCCGCAGGAGGCCACAC | |
| | UGGACCAGGCAGCUGUAUCCAACGCCGUGGACGGCUUCC | |
| | UGGGCAGACUGUCCCUGGAACGGGAGGACCGGGACGCCU | |
| | GGCACCUGCCUGCCUACAAGUGUGUGGAUCGGCUGGACA | |
| | AGGUGCUGAUGAUCAUCCCUCUGAUUAAUGUCACCUUCA | |
| | UCAUCAGCAGCGACCGGGAGGUGCGGGGAUCCGCCCUCU | |
| | ACGAGGCCAGCACCACCUAUCUGAGCAGCAGCCUGUUCCU | |
| | GUCUCCUGUGAUCAUGAACAAGUGCAGCCAGGGCGCCGU | |
| | GGCCGGCGAGCCCCGGCAGAUCCCCAAGAUCCAGAACUUC | |
| | ACCCGGACCCAGAAGUCUUGCAUCUUCUGCGGCUUCGCCC | |
| | UUUUGUCCUACGACGAGAAGGAGGGCUUGGAGACUACAA | |
| | CCUACAUCACCAGCCAGGAGGUGCAGAACAGCAUCCUGU | |
| | CAUCUAAUUACUUCGACUUCGACAACCUGCACGUUCAUU | |
| | ACCUGCUCCUCACCACCAACGGUACCGUCAUGGAAAUCGC | |
| | CGGACUGUACGAGGAGCGGGCCCAUGUUGUGCUGGCCAU | |
| | CAUCCUGUACUUCAUCGCUUUCGCACUUGGCAUCUUCCU | |
| | GGUGCACAAGAUCGUGAUGUUCUUCCUG | |
| 3′ UTR | UGAUAAUAGGCUGGAGCCUCGGUGGCCUAGCUUCUUGCC | 106 |
| | CCUUGGGCCUCCCCCCAGCCCCUCCUCCCCUUCCUGCACC | |
| | CGUACCCCCGUGGUCUUUGAAUAAAGUCUGAGUGGGCGG | |
| | C | |
| Corresponding | MVSFKQVRVPLFTAIALVIVLLLAYFLPPRVRGGGRVAAAAIT | 217 |
| amino acid | WVPKPNVEVWPVDPPPPVNFNKTAEQEYGDKEVKLPHWTPT | |
| sequence | LHTFQVPQNYTKANCTYCNTREYTFSYKGCCFYFTKKKHTW | |
| | NGCFQACAELYPCTYFYGPTPDILPVVTRNLNAIESLWVGVYR | |
| | VGEGNWTSLDGGTFKVYQIFGSHCTYVSKFSTVPVSHHECSFL | |
| | KPCLCVSQRSNSGGGGSGGGGSGGGGSGGGGSGGGGSGGGG | |
| | SPCCHVTQLRAQHLLALENISDIYLVSNQTCDGFSLASLNSPK | |
| | NGSNQLVISRCANGLNVVSFFISILKRSSSALTGHLRELLTTLET | |
| | LYGSFSVEDLFGANLNRYAWHRGGGGGGSGGGGSGGGGSG | |
| | GGGSLSEVKLHLDIEGHASHYTIPWTELMAKVPGLSPEALWR | |
| | EANVTEDLASMLNRYKLIYKTSGTLGIALAEPVDIPAVSEGSM | |
| | QVDASKVHPGVISGLNSPACMLSAPLEKQLFYYIGTMLPNTRP | |
| | HSYVFYQLRCHLSYVALSINGDKFQYTGAMTSKFLMGTYKR | |
| | VTEKGDEHVLSLVFGKTKDLPDLRGPFSYPSLTSAQSGDYSLV | |
| | IVTTFVHYANFHNYFVPNLKDMFSRAVTMTAASYARYVLQK | |
| | LVLLEMKGGCREPELDTETLTTMFEVSVAFFKVGHAVGETGN | |
| | GCVDLRWLAKSFFELTVLKDIIGICYGATVKGMQSYGLERLA | |
| | AMLMATVKMEELGHLTTEKQEYALRLATVGYPKAGVYSGLI | |
| | GGATSVLLSAYNRHPLFQPLHTVMRETLFIGSHVVLRELRLNV | |
| | TTQGPNLALYQLLSTALCSALEIGEVLRGLALGTESGLFSPCYL | |
| | SLRFDLTRDKLLSMAPQEATLDQAAVSNAVDGFLGRLSLERE | |
| | DRDAWHLPAYKCVDRLDKVLMIIPLINVTFIISSDREVRGSAL | |
| | YEASTTYLSSSLFLSPVIMNKCSQGAVAGEPRQIPKIQNFTRTQ | |
| | KSCIFCGFALLSYDEKEGLETTTYITSQEVQNSILSSNYFDFDN | |
| | LHVHYLLLTTNGTVMEIAGLYEERAHVVLAIILYFIAFALGIFL | |
| | VHKIVMFFL | |
| PolyA tail | 100 nt | |

EBV Linked Construct 3 (1723940)

| SEQ ID NO: 218 consists of from 5′ end to 3′ end: | | 218 |
|---|---|---|
| 5′ UTR SEQ ID NO: 104, mRNA ORF SEQ ID NO: 219, and | | |
| 3′ UTR SEQ ID NO: 106. | | |
| Chemistry | 1-methylpseudouridine | |
| Cap | 7mG(5′)ppp(5′)NlmpNp | |
| 5′ UTR | GGGAAAUAAGAGAGAAAAGAAGAGUAAGAAGAAAUAUA | 104 |
| | AGACCCCGGCGCCGCCACC | |
| ORF of mRNA | AUGAGAGCCGUGGGCGUGUUCCUGGCCAUCUGCCUGGUG | 219 |
| Construct | ACCAUCUUCGUGCUGCCCACCUGGGGCAACUGGGCCUACC | |
| (excluding | CCUGCUGCCACGUGACCCAGCUGAGAGCCCAGCACCUGCU | |
| the stop | GGCCCUGGAGAACAUCAGCGACAUCUACCUGGUGAGCAA | |
| codon) | CCAGACCUGCGACGGCUUCAGCCUGGCCAGCCUGAACAGC | |
| | CCCAAGAACGGCAGCAACCAGCUGGUGAUCAGCAGAUGC | |
| | GCCAACGGCCUGAACGUGGUGAGCUUCUUCAUCAGCAUC | |
| | CUGAAGAGAAGCAGCAGCGCCCUGACCGGCCACCUGAGA | |
| | GAGCUGCUGACCACCCUGGAGACCCUGUACGGCAGCUUC | |
| | AGCGUGGAGGACCUGUUCGGCGCCAACCUGAACAGAUAC | |
| | GCCUGGCACAGAGGCGGCGGAGGAGGUGGCAGCGGAGGA | |
| | GGAGGGUCUGGAGGUGGCGGCAGCCUUAGCGAGGUGAAG | |
| | CUCCACUUGGACAUCGAGGGCCACGCCAGCCACUACACCA | |
| | UCCCCUGGACCGAGCUCAUGGCCAAGGUGCCCGGCCUUAG | |
| | CCCCGAGGCCCUGUGGCGGGAGGCCAACGUGACCGAGGA | |
| | CCUGGCCAGCAUGCUGAACCGGUACAAGCUGAUCUACAA | |
| | GACCAGCGGCACCCUGGGCAUCGCCCUGGCCGAGCCCGUG | |
| | GACAUCCCCGCCGUUAGCGAAGGCAGCAUGCAGGUGGAC | |
| | GCCAGCAAGGUGCACCCCGGCGUGAUCAGCGGCCUGAAC | |
| | AGCCCCGCCUGUAUGUUGAGCGCCCCACUGGAGAAGCAG | |
| | CUGUUCUACUACAUCGGCACCAUGCUGCCCAACACCCGGC | |
| | CCCACAGCUACGUGUUCUACCAGCUGCGGUGCCACCUGAG | |
| | CUACGUUGCCCUGAGCAUCAACGGCGACAAGUUCCAGUA | |
| | CACCGGCGCCAUGACCAGCAAGUUCCUGAUGGGCACCUAC | |
| | AAGCGGGUCACCGAGAAGGGCGACGAGCACGUGCUGUCA | |
| | CUGGUGUUCGGCAAGACCAAGGACCUGCCCGACCUGCGG | |
| | GGCCCCUUCAGCUACCCUAGUUUGACCAGCGCCCAGAGCG | |
| | GCGACUACAGCUUGGUGAUCGUGACCACCUUCGUGCACU | |
| | ACGCCAACUUCCACAACUACUUCGUGCCCAACCUGAAGGA | |
| | CAUGUUCAGCCGGGCCGUGACCAUGACUGCCGCUUCUUA | |
| | CGCCCGGUACGUGCUGCAGAAGCUGGUCCUGCUGGAGAU | |
| | GAAGGGCGGCUGCCGGGAGCCCGAGCUGGACACCGAAAC | |
| | ACUGACCACCAUGUUCGAGGUGAGCGUGGCCUUCUUCAA | |
| | GGUGGGUCACGCGGUGGGCGAAACCGGCAACGGCUGCGU | |
| | GGACUUACGCUGGCUGGCCAAGAGCUUCUUCGAGCUGAC | |
| | CGUGCUGAAGGAUAUCAUCGGCAUCUGCUACGGCGCCAC | |
| | CGUGAAGGGCAUGCAGAGCUACGGCCUGGAGCGGCUGGC | |
| | CGCCAUGCUUAUGGCAACAGUGAAGAUGGAGGAGCUGGG | |
| | ACACCUGACAACAGAGAAGCAGGAGUACGCCCUGAGACU | |
| | GGCCACAGUGGGCUACCCAAAGGCCGGCGUGUACAGUGG | |
| | ACUGAUCGGCGGCGCAACCAGCGUGCUGCUAUCCGCUUA | |
| | CAACCGGCACCCGCUGUUCCAGCCCCUGCACACCGUGAUG | |
| | CGGGAAACCCUGUUCAUCGGAAGCCACGUCGUGCUGCGG | |
| | GAGCUGAGGCUGAACGUAACCACCCAGGGCCCUAAUCUG | |
| | GCCCUGUAUCAGCUCCUCAGUACCGCCCUGUGCAGCGCCC | |
| | UUGAGAUCGGCGAGGUGCUCAGAGGCCUGGCCCUCGGUA | |
| | CCGAGAGCGGCCUCUUCAGCCCAUGCUACUUAAGCCUGCG | |
| | GUUCGACCUGACCCGGGACAAGUUGCUGAGCAUGGCCCC | |
| | GCAGGAGGCCACACUGGACCAGGCAGCUGUAUCCAACGC | |
| | CGUGGACGGCUUCCUGGGCAGACUGUCCCUGGAACGGGA | |
| | GGACCGGGACGCCUGGCACCUGCCUGCCUACAAGUGUGU | |
| | GGAUCGGCUGGACAAGGUGCUGAUGAUCAUCCCUCUGAU | |
| | UAAUGUCACCUUCAUCAUCAGCAGCGACCGGGAGGUGCG | |
| | GGGAUCCGCCCUCUACGAGGCCAGCACCACCUAUCUGAGC | |
| | AGCAGCCUGUUCCUGUCUCCUGUGAUCAUGAACAAGUGC | |
| | AGCCAGGGCGCCGUGGCCGGCGAGCCCCGGCAGAUCCCCA | |
| | AGAUCCAGAACUUCACCCGGACCCAGAAGUCUUGCAUCU | |
| | UCUGCGGCUUCGCCCUUUUGUCCUACGACGAGAAGGAGG | |
| | GCUUGGAGACUACAACCUACAUCACCAGCCAGGAGGUGC | |
| | AGAACAGCAUCCUGUCAUCUAAUUACUUCGACUUCGACA | |
| | ACCUGCACGUUCAUUACCUGCUCCUCACCACCAACGGUAC | |
| | CGUCAUGGAAAUCGCCGGACUGUACGAGGAGCGGGCCCA | |
| | UGUUGUGCUGGCCAUCAUCCUGUACUUCAUCGCUUUCGC | |
| | ACUUGGCAUCUUCCUGGUGCACAAGAUCGUGAUGUUCUU | |
| | CCUG | |
| 3′UTR | UGAUAAUAGGCUGGAGCCUCGGUGGCCUAGCUUCUUGCC | 106 |
| | CCUUGGGCCUCCCCCCAGCCCCUCCUCCCCUUCCUGCACC | |
| | CGUACCCCCGUGGUCUUUGAAUAAAGUCUGAGUGGGCGG | |
| | C | |
| Corresponding | MRAVGVFLAICLVTIFVLPTWGNWAYPCCHVTQLRAQHLLA | 220 |
| amino acid | LENISDIYLVSNQTCDGFSLASLNSPKNGSNQLVISRCANGLNV | |
| sequence | VSFFISILKRSSSALTGHLRELLTTLETLYGSFSVEDLFGANLNR | |
| | YAWHRGGGGGGSGGGGSGGGGSLSEVKLHLDIEGHASHYTIP | |
| | WTELMAKVPGLSPEALWREANVTEDLASMLNRYKLIYKTSG | |
| | TLGIALAEPVDIPAVSEGSMQVDASKVHPGVISGLNSPACMLS | |
| | APLEKQLFYYIGTMLPNTRPHSYVFYQLRCHLSYVALSINGDK | |
| | FQYTGAMTSKFLMGTYKRVTEKGDEHVLSLVFGKTKDLPDL | |
| | RGPFSYPSLTSAQSGDYSLVIVTTFVHYANFHNYFVPNLKDMF | |
| | SRAVTMTAASYARYVLQKLVLLEMKGGCREPELDTETLTTM | |
| | FEVSVAFFKVGHAVGETGNGCVDLRWLAKSFFELTVLKDIIGI | |
| | CYGATVKGMQSYGLERLAAMLMATVKMEELGHLTTEKQEY | |
| | ALRLATVGYPKAGVYSGLIGGATSVLLSAYNRHPLFQPLHTV | |
| | MRETLFIGSHVVLRELRLNVTTQGPNLALYQLLSTALCSALEI | |
| | GEVLRGLALGTESGLFSPCYLSLRFDLTRDKLLSMAPQEATLD | |
| | QAAVSNAVDGFLGRLSLEREDRDAWHLPAYKCVDRLDKVL | |
| | MIIPLINVTFIISSDREVRGSALYEASTTYLSSSLFLSPVIMNKCS | |
| | QGAVAGEPRQIPKIQNFTRTQKSCIFCGFALLSYDEKEGLETTT | |
| | YITSQEVQNSILSSNYFDFDNLHVHYLLLTTNGTVMEIAGLYE | |
| | ERAHVVLAIILYFIAFALGIFLVHKIVMFFL | |
| PolyA tail | 100 nt | |

EBV Linked Construct 4 (1723939)

| SEQ ID NO: 221 consists of from 5′ end to 3′ end: | | 221 |
|---|---|---|
| 5′ UTR SEQ ID NO: 104, mRNA ORF SEQ ID NO: 222, and | | |
| 3′ UTR SEQ ID NO: 106. | | |
| Chemistry | 1-methylpseudouridine | |
| Cap | 7mG(5′)ppp(5′)NlmpNp | |
| 5′ UTR | GGGAAAUAAGAGAGAAAAGAAGAGUAAGAAGAAAUAUA | 104 |
| | AGACCCCGGCGCCGCCACC | |
| ORF of mRNA | AUGAGAGCCGUGGGCGUGUUCCUGGCCAUCUGCCUGGUG | 222 |
| Construct | ACCAUCUUCGUGCUGCCCACCUGGGGCAACUGGGCCUACC | |
| (excluding | CCUGCUGCCACGUGACCCAGCUGAGAGCCCAGCACCUGCU | |
| the stop | GGCCCUGGAGAACAUCAGCGACAUCUACCUGGUGAGCAA | |
| codon) | CCAGACCUGCGACGGCUUCAGCCUGGCCAGCCUGAACAGC | |
| | CCCAAGAACGGCAGCAACCAGCUGGUGAUCAGCAGAUGC | |
| | GCCAACGGCCUGAACGUGGUGAGCUUCUUCAUCAGCAUC | |
| | CUGAAGAGAAGCAGCAGCGCCCUGACCGGCCACCUGAGA | |
| | GAGCUGCUGACCACCCUGGAGACCCUGUACGGCAGCUUC | |
| | AGCGUGGAGGACCUGUUCGGCGCCAACCUGAACAGAUAC | |
| | GCCUGGCACAGAGGCGGCGGAGGAGGUGGCUCCGGUGGA | |
| | GGUGGCAGCGGAGGAGGAGGCAGUGGUGGCGGAGGCAGC | |
| | CUUAGCGAGGUGAAGCUCCACUUGGACAUCGAGGGCCAC | |
| | GCCAGCCACUACACCAUCCCCUGGACCGAGCUCAUGGCCA | |
| | AGGUGCCCGGCCUUAGCCCCGAGGCCCUGUGGCGGGAGG | |
| | CCAACGUGACCGAGGACCUGGCCAGCAUGCUGAACCGGU | |
| | ACAAGCUGAUCUACAAGACCAGCGGCACCCUGGGCAUCG | |
| | CCCUGGCCGAGCCCGUGGACAUCCCCGCCGUUAGCGAAGG | |
| | CAGCAUGCAGGUGGACGCCAGCAAGGUGCACCCCGGCGU | |
| | GAUCAGCGGCCUGAACAGCCCCGCCUGUAUGUUGAGCGC | |
| | CCCACUGGAGAAGCAGCUGUUCUACUACAUCGGCACCAU | |
| | GCUGCCCAACACCCGGCCCCACAGCUACGUGUUCUACCAG | |
| | CUGCGGUGCCACCUGAGCUACGUUGCCCUGAGCAUCAAC | |
| | GGCGACAAGUUCCAGUACACCGGCGCCAUGACCAGCAAG | |
| | UUCCUGAUGGGCACCUACAAGCGGGUCACCGAGAAGGGC | |
| | GACGAGCACGUGCUGUCACUGGUGUUCGGCAAGACCAAG | |
| | GACCUGCCCGACCUGCGGGGCCCCUUCAGCUACCCUAGUU | |
| | UGACCAGCGCCCAGAGCGGCGACUACAGCUUGGUGAUCG | |
| | UGACCACCUUCGUGCACUACGCCAACUUCCACAACUACUU | |
| | CGUGCCCAACCUGAAGGACAUGUUCAGCCGGGCCGUGAC | |
| | CAUGACUGCCGCUUCUUACGCCCGGUACGUGCUGCAGAA | |
| | GCUGGUCCUGCUGGAGAUGAAGGGCGGCUGCCGGGAGCC | |
| | CGAGCUGGACACCGAAACACUGACCACCAUGUUCGAGGU | |
| | GAGCGUGGCCUUCUUCAAGGUGGGUCACGCGGUGGGCGA | |
| | AACCGGCAACGGCUGCGUGGACUUACGCUGGCUGGCCAA | |
| | GAGCUUCUUCGAGCUGACCGUGCUGAAGGAUAUCAUCGG | |
| | CAUCUGCUACGGCGCCACCGUGAAGGGCAUGCAGAGCUA | |
| | CGGCCUGGAGCGGCUGGCCGCCAUGCUUAUGGCAACAGU | |
| | GAAGAUGGAGGAGCUGGGACACCUGACAACAGAGAAGCA | |
| | GGAGUACGCCCUGAGACUGGCCACAGUGGGCUACCCAAA | |
| | GGCCGGCGUGUACAGUGGACUGAUCGGCGGCGCAACCAG | |
| | CGUGCUGCUAUCCGCUUACAACCGGCACCCGCUGUUCCAG | |
| | CCCCUGCACACCGUGAUGCGGGAAACCCUGUUCAUCGGA | |
| | AGCCACGUCGUGCUGCGGGAGCUGAGGCUGAACGUAACC | |
| | ACCCAGGGCCCUAAUCUGGCCCUGUAUCAGCUCCUCAGUA | |
| | CCGCCCUGUGCAGCGCCCUUGAGAUCGGCGAGGUGCUCA | |
| | GAGGCCUGGCCCUCGGUACCGAGAGCGGCCUCUUCAGCCC | |
| | AUGCUACUUAAGCCUGCGGUUCGACCUGACCCGGGACAA | |
| | GUUGCUGAGCAUGGCCCCGCAGGAGGCCACACUGGACCA | |
| | GGCAGCUGUAUCCAACGCCGUGGACGGCUUCCUGGGCAG | |
| | ACUGUCCCUGGAACGGGAGGACCGGGACGCCUGGCACCU | |
| | GCCUGCCUACAAGUGUGUGGAUCGGCUGGACAAGGUGCU | |
| | GAUGAUCAUCCCUCUGAUUAAUGUCACCUUCAUCAUCAG | |
| | CAGCGACCGGGAGGUGCGGGGAUCCGCCCUCUACGAGGC | |
| | CAGCACCACCUAUCUGAGCAGCAGCCUGUUCCUGUCUCCU | |
| | GUGAUCAUGAACAAGUGCAGCCAGGGCGCCGUGGCCGGC | |
| | GAGCCCCGGCAGAUCCCCAAGAUCCAGAACUUCACCCGGA | |
| | CCCAGAAGUCUUGCAUCUUCUGCGGCUUCGCCCUUUUGU | |
| | CCUACGACGAGAAGGAGGGCUUGGAGACUACAACCUACA | |
| | UCACCAGCCAGGAGGUGCAGAACAGCAUCCUGUCAUCUA | |
| | AUUACUUCGACUUCGACAACCUGCACGUUCAUUACCUGC | |
| | UCCUCACCACCAACGGUACCGUCAUGGAAAUCGCCGGACU | |
| | GUACGAGGAGCGGGCCCAUGUUGUGCUGGCCAUCAUCCU | |
| | GUACUUCAUCGCUUUCGCACUUGGCAUCUUCCUGGUGCA | |
| | CAAGAUCGUGAUGUUCUUCCUG | |
| 3′ UTR | UGAUAAUAGGCUGGAGCCUCGGUGGCCUAGCUUCUUGCC | 106 |
| | CCUUGGGCCUCCCCCCAGCCCCUCCUCCCCUUCCUGCACC | |
| | CGUACCCCCGUGGUCUUUGAAUAAAGUCUGAGUGGGCGG | |
| | C | |
| Corresponding | MRAVGVFLAICLVTIFVLPTWGNWAYPCCHVTQLRAQHLLA | 223 |
| amino acid | LENISDIYLVSNQTCDGFSLASLNSPKNGSNQLVISRCANGLNV | |
| sequence | VSFFISILKRSSSALTGHLRELLTTLETLYGSFSVEDLFGANLNR | |
| | YAWHRGGGGGGSGGGGSGGGGSGGGGSLSEVKLHLDIEGHA | |
| | SHYTIPWTELMAKVPGLSPEALWREANVTEDLASMLNRYKLI | |
| | YKTSGTLGIALAEPVDIPAVSEGSMQVDASKVHPGVISGLNSP | |
| | ACMLSAPLEKQLFYYIGTMLPNTRPHSYVFYQLRCHLSYVAL | |
| | SINGDKFQYTGAMTSKFLMGTYKRVTEKGDEHVLSLVFGKT | |
| | KDLPDLRGPFSYPSLTSAQSGDYSLVIVTTFVHYANFHNYFVP | |
| | NLKDMFSRAVTMTAASYARYVLQKLVLLEMKGGCREPELDT | |
| | ETLTTMFEVSVAFFKVGHAVGETGNGCVDLRWLAKSFFELTV | |
| | LKDIIGICYGATVKGMQSYGLERLAAMLMATVKMEELGHLT | |
| | TEKQEYALRLATVGYPKAGVYSGLIGGATSVLLSAYNRHPLF | |
| | QPLHTVMRETLFIGSHVVLRELRLNVTTQGPNLALYQLLSTAL | |
| | CSALEIGEVLRGLALGTESGLFSPCYLSLRFDLTRDKLLSMAP | |
| | QEATLDQAAVSNAVDGFLGRLSLEREDRDAWHLPAYKCVDR | |
| | LDKVLMIIPLINVTFIISSDREVRGSALYEASTTYLSSSLFLSPVI | |
| | MNKCSQGAVAGEPRQIPKIQNFTRTQKSCIFCGFALLSYDEKE | |
| | GLETTTYITSQEVQNSILSSNYFDFDNLHVHYLLLTTNGTVMEI | |
| | AGLYEERAHVVLAIILYFIAFALGIFLVHKIVMFFL | |
| PolyA tail | 100 nt | |

EBV gH (BXLF2)_RX-UTRB

| SEQ ID NO: 228 consists of from 5′ end to 3′ end: | | 228 |
|---|---|---|
| 5′ UTR SEQ ID NO: 104, mRNA ORF SEQ ID NO: 84, and | | |
| 3′ UTR SEQ ID NO: 3 | | |
| Chemistry | 1-methylpseudouridine | |
| Cap | 7mG(5′)ppp(5′)NlmpNp | |
| 5′UTR | GGGAAAUAAGAGAGAAAAGAAGAGUAAGAAGAAAUAUA | 104 |
| | AGACCCCGGCGCCGCCACC | |
| ORF of mRNA | AUGCAGUUGUUGUGCGUGUUCUGCCUCGUGUUACUCUGG | 84 |
| Construct | GAGGUGGGCGCCGCCAGCCUUAGCGAGGUGAAGCUCCAC | |
| (excluding | UUGGACAUCGAGGGCCACGCCAGCCACUACACCAUCCCCU | |
| the stop | GGACCGAGCUCAUGGCCAAGGUGCCCGGCCUUAGCCCCGA | |
| codon) | GGCCCUGUGGCGGGAGGCCAACGUGACCGAGGACCUGGC | |
| | CAGCAUGCUGAACCGGUACAAGCUGAUCUACAAGACCAG | |
| | CGGCACCCUGGGCAUCGCCCUGGCCGAGCCCGUGGACAUC | |
| | CCCGCCGUUAGCGAAGGCAGCAUGCAGGUGGACGCCAGC | |
| | AAGGUGCACCCCGGCGUGAUCAGCGGCCUGAACAGCCCCG | |
| | CCUGUAUGUUGAGCGCCCCACUGGAGAAGCAGCUGUUCU | |
| | ACUACAUCGGCACCAUGCUGCCCAACACCCGGCCCCACAG | |
| | CUACGUGUUCUACCAGCUGCGGUGCCACCUGAGCUACGU | |
| | UGCCCUGAGCAUCAACGGCGACAAGUUCCAGUACACCGG | |
| | CGCCAUGACCAGCAAGUUCCUGAUGGGCACCUACAAGCG | |
| | GGUCACCGAGAAGGGCGACGAGCACGUGCUGUCACUGGU | |
| | GUUCGGCAAGACCAAGGACCUGCCCGACCUGCGGGGCCCC | |
| | UUCAGCUACCCUAGUUUGACCAGCGCCCAGAGCGGCGAC | |
| | UACAGCUUGGUGAUCGUGACCACCUUCGUGCACUACGCC | |
| | AACUUCCACAACUACUUCGUGCCCAACCUGAAGGACAUG | |
| | UUCAGCCGGGCCGUGACCAUGACUGCCGCUUCUUACGCCC | |
| | GGUACGUGCUGCAGAAGCUGGUCCUGCUGGAGAUGAAGG | |
| | GCGGCUGCCGGGAGCCCGAGCUGGACACCGAAACACUGA | |
| | CCACCAUGUUCGAGGUGAGCGUGGCCUUCUUCAAGGUGG | |
| | GUCACGCGGUGGGCGAAACCGGCAACGGCUGCGUGGACU | |
| | UACGCUGGCUGGCCAAGAGCUUCUUCGAGCUGACCGUGC | |
| | UGAAGGAUAUCAUCGGCAUCUGCUACGGCGCCACCGUGA | |
| | AGGGCAUGCAGAGCUACGGCCUGGAGCGGCUGGCCGCCA | |
| | UGCUUAUGGCAACAGUGAAGAUGGAGGAGCUGGGACACC | |
| | UGACAACAGAGAAGCAGGAGUACGCCCUGAGACUGGCCA | |
| | CAGUGGGCUACCCAAAGGCCGGCGUGUACAGUGGACUGA | |
| | UCGGCGGCGCAACCAGCGUGCUGCUAUCCGCUUACAACCG | |
| | GCACCCGCUGUUCCAGCCCCUGCACACCGUGAUGCGGGAA | |
| | ACCCUGUUCAUCGGAAGCCACGUCGUGCUGCGGGAGCUG | |
| | AGGCUGAACGUAACCACCCAGGGCCCUAAUCUGGCCCUG | |
| | UAUCAGCUCCUCAGUACCGCCCUGUGCAGCGCCCUUGAGA | |
| | UCGGCGAGGUGCUCAGAGGCCUGGCCCUCGGUACCGAGA | |
| | GCGGCCUCUUCAGCCCAUGCUACUUAAGCCUGCGGUUCG | |
| | ACCUGACCCGGGACAAGUUGCUGAGCAUGGCCCCGCAGG | |
| | AGGCCACACUGGACCAGGCAGCUGUAUCCAACGCCGUGG | |
| | ACGGCUUCCUGGGCAGACUGUCCCUGGAACGGGAGGACC | |
| | GGGACGCCUGGCACCUGCCUGCCUACAAGUGUGUGGAUC | |
| | GGCUGGACAAGGUGCUGAUGAUCAUCCCUCUGAUUAAUG | |
| | UCACCUUCAUCAUCAGCAGCGACCGGGAGGUGCGGGGAU | |
| | CCGCCCUCUACGAGGCCAGCACCACCUAUCUGAGCAGCAG | |
| | CCUGUUCCUGUCUCCUGUGAUCAUGAACAAGUGCAGCCA | |
| | GGGCGCCGUGGCCGGCGAGCCCCGGCAGAUCCCCAAGAUC | |
| | CAGAACUUCACCCGGACCCAGAAGUCUUGCAUCUUCUGC | |
| | GGCUUCGCCCUUUUGUCCUACGACGAGAAGGAGGGCUUG | |
| | GAGACUACAACCUACAUCACCAGCCAGGAGGUGCAGAAC | |
| | AGCAUCCUGUCAUCUAAUUACUUCGACUUCGACAACCUG | |
| | CACGUUCAUUACCUGCUCCUCACCACCAACGGUACCGUCA | |
| | UGGAAAUCGCCGGACUGUACGAGGAGCGGGCCCAUGUUG | |
| | UGCUGGCCAUCAUCCUGUACUUCAUCGCUUUCGCACUUG | |
| | GCAUCUUCCUGGUGCACAAGAUCGUGAUGUUCUUCCUG | |
| 3′ UTR | UGAUAAUAGGCUGGAGCCUCGGUGGCCAUGCUUCUUGCC | 3 |
| | CCUUGGGCCUCCCCCCAGCCCCUCCUCCCCUUCCUGCACC | |
| | CGUACCCCCGUGGUCUUUGAAUAAAGUCUGAGUGGGCGG | |
| | C | |
| Corresponding | MQLLCVFCLVLLWEVGAASLSEVKLHLDIEGHASHYTIPWTE | 38 |
| amino acid | LMAKVPGLSPEALWREANVTEDLASMLNRYKLIYKTSGTLGI | |
| sequence | ALAEPVDIPAVSEGSMQVDASKVHPGVISGLNSPACMLSAPLE | |
| | KQLFYYIGTMLPNTRPHSYVFYQLRCHLSYVALSINGDKFQYT | |
| | GAMTSKFLMGTYKRVTEKGDEHVLSLVFGKTKDLPDLRGPFS | |
| | YPSLTSAQSGDYSLVIVTTFVHYANFHNYFVPNLKDMFSRAV | |
| | TMTAASYARYVLQKLVLLEMKGGCREPELDTETLTTMFEVS | |
| | VAFFKVGHAVGETGNGCVDLRWLAKSFFELTVLKDIIGICYG | |
| | ATVKGMQSYGLERLAAMLMATVKMEELGHLTTEKQEYALR | |
| | LATVGYPKAGVYSGLIGGATSVLLSAYNRHPLFQPLHTVMRE | |
| | TLFIGSHVVLRELRLNVTTQGPNLALYQLLSTALCSALEIGEVL | |
| | RGLALGTESGLFSPCYLSLRFDLTRDKLLSMAPQEATLDQAA | |
| | VSNAVDGFLGRLSLEREDRDAWHLPAYKCVDRLDKVLMIIPL | |
| | INVTFIISSDREVRGSALYEASTTYLSSSLFLSPVIMNKCSQGAV | |
| | AGEPRQIPKIQNFTRTQKSCIFCGFALLSYDEKEGLETTTYITSQ | |
| | EVQNSILSSNYFDFDNLHVHYLLLTTNGTVMEIAGLYEERAH | |
| | VVLAIILYFIAFALGIFLVHKIVMFFL | |
| PolyA tail | 100 nt | |

EBV gL (B95-8)-UTRB

| SEQ ID NO: 229 consists of from 5′ end to 3′ end: | | 229 |
|---|---|---|
| 5′ UTR SEQ ID NO: 104, mRNA ORF SEQ ID NO: 85, and | | |
| 3′ UTR SEQ ID NO: 3 | | |
| Chemistry | 1-methylpseudouridine | |
| Cap | 7mG(5′)ppp(5′)NlmpNp | |
| 5′ UTR | GGGAAAUAAGAGAGAAAAGAAGAGUAAGAAGAAAUAUA | 104 |
| | AGACCCCGGCGCCGCCACC | |
| ORF of mRNA | AUGAGAGCCGUGGGCGUGUUCCUGGCCAUCUGCCUGGUG | 85 |
| Construct | ACCAUCUUCGUGCUGCCCACCUGGGGCAACUGGGCCUACC | |
| (excluding | CCUGCUGCCACGUGACCCAGCUGAGAGCCCAGCACCUGCU | |
| the stop | GGCCCUGGAGAACAUCAGCGACAUCUACCUGGUGAGCAA | |
| codon) | CCAGACCUGCGACGGCUUCAGCCUGGCCAGCCUGAACAGC | |
| | CCCAAGAACGGCAGCAACCAGCUGGUGAUCAGCAGAUGC | |
| | GCCAACGGCCUGAACGUGGUGAGCUUCUUCAUCAGCAUC | |
| | CUGAAGAGAAGCAGCAGCGCCCUGACCGGCCACCUGAGA | |
| | GAGCUGCUGACCACCCUGGAGACCCUGUACGGCAGCUUC | |
| | AGCGUGGAGGACCUGUUCGGCGCCAACCUGAACAGAUAC | |
| | GCCUGGCACAGAGGCGGC | |
| 3′ UTR | UGAUAAUAGGCUGGAGCCUCGGUGGCCAUGCUUCUUGCC | 3 |
| | CCUUGGGCCUCCCCCCAGCCCCUCCUCCCCUUCCUGCACC | |
| | CGUACCCCCGUGGUCUUUGAAUAAAGUCUGAGUGGGCGG | |
| | C | |
| Corresponding | MRAVGVFLAICLVTIFVLPTWGNWAYPCCHVTQLRAQHLLA | 36 |
| amino acid | LENISDIYLVSNQTCDGFSLASLNSPKNGSNQLVISRCANGLNV | |
| sequence | VSFFISILKRSSSALTGHLRELLTTLETLYGSFSVEDLFGANLNR | |
| | YAWHRGG | |
| PolyA tail | 100 nt | |

The application's sequence listing, which the Patent Office published only in electronic form, follows.

SEQUENCE LISTING (229 sequences)

SEQ ID NO: 1 - RNA, 47 nt, Artificial Sequence
  Synthetic Polynucleotide
gggaaauaagagagaaaagaagaguaagaagaaauauaagagccacc

SEQ ID NO: 2 - RNA, 1209 nt, Artificial Sequence
  Synthetic Polynucleotide
augagcgacgaggguccgggcacaggacccgguaacggguugggcgaaaagggugacacuagcgggcccgaagguuccggcggaucuggcccgcaacgcagagguggugauaaccacggucgcgguagaggcagaggccguggccgggguggcggaaggcccggugccccuggagggucagggucuggcccaaggcaccgugauggggugcgucgcccccagaaacgcccguccuguaucggcugcaagggcacgcauggcggaacgggagguggcgcaggagccggaggugcaagaggucgcggggggucaggggggagagguagagggggaucaggggggcggagagggcggggucgagaaagagcaagagguggcuccagagagcgcgcucggggucgcgggcgaggccggggugaaaaacggccccggagcccauccucgcaaucaucaagcucgggaucgccaccucggcggccgccccccggcaggcgucccuuuuuccacccagugggcgaagccgacuacuucgaguaccaccaggagggaggaccggauggugagccggauguuccucccggcgccaucgaacaagguccugccgaugauccaggcgaggggcccucaacaggcccccgagggcagggggacgggggacgucggaagaaaggaggcugguuuggcaagcaccgaggacagggggguagcaacccgaaauuugagaacaucgccgaggggcucagggcucuccuagcccguagccacgucgaaagaacuaccgaugagggcaccuggguugccggcguguucguguacggggguagcaagaccucucuauacaaccuucggagggggacugcacuugcuaucccccaaugccgccucacaccacugucucgccugccauucggcauggcccccggcccggggccacagccugggccccuacgggaaucuauuguuugcuauuuuaugguguuccugcagacccauaucuucgcagaaguccugaaagacgccaucaaagacuuaguuaugacuaaacccgcacccaccugcaacauucgcgugaccguaugcagcuuugaugauggcgucgaucugcccccaugguuccccccuauggucgagggcgccgccgccgaaggggacgacggggaugacggggaugaaggcggggacggcgaugagggcgaggagggccaggaa

SEQ ID NO: 3 - RNA, 119 nt, Artificial Sequence
  Synthetic Polynucleotide
ugauaauaggcuggagccucgguggccaugcuucuugccccuugggccuccccccagccccuccuccccuuccugcacccguacccccguggucuuugaauaaagucugagugggcggc

SEQ ID NO: 4 - protein, 403 aa, Artificial Sequence
  Synthetic Polypeptide
MSDEGPGTGPGNGLGEKGDTSGPEGSGGSGPQRRGGDNHGRGRGRGRGRGGGRPGAPGGSGSGPRHRDGVRRPQKRPSCIGCKGTHGGTGGGAGAGGARGRGGSGGRGRGGSGGRRGRGRERARGGSRERARGRGRGRGEKRPRSPSSQSSSSGSPPRRPPPGRRPFFHPVGEADYFEYHQEGGPDGEPDVPPGAIEQGPADDPGEGPSTGPRGQGDGGRRKKGGWFGKHRGQGGSNPKFENIAEGLRALLARSHVERTTDEGTWVAGVFVYGGSKTSLYNLRRGTALAIPQCRLTPLSRLPFGMAPGPGPQPGPLRESIVCYFMVFLQTHIFAEVLKDAIKDLVMTKPAPTCNIRVTVCSFDDGVDLPPWFPPMVEGAAAEGDDGDDGDEGGDGDEGEEGQE

SEQ ID NO: 5 - RNA, 1209 nt, Artificial Sequence
  Synthetic Polynucleotide
augagugacgagggaccugggacuggccccgggaacggucugggugagaaaggugacacgucugguccugaaggaucuggcgguucagggccgcagcgcagaggaggagacaaccacgguagaggacguggacgcgggagaggccgagggggcggaagaccuggugcaccgggcgguuccggcucggggccccgccacagggauggggugcggagaccacagaagcgccccucuugcaucggcugcaagggaacccauggggguaccggagggggagcuggugcagguggcgcccgugguagggguggcagcggggggcguggaagaggugguucaggcggacggaggggacgcggacgugaacgugcccggggaggaucccgggagagggcacggggccgcggcagaggcagaggggagaagagaccuagauccccuagcucucaauccagcagcagugggucccccccgaggcgaccgccuccagguaggcgcccuuucuuccaccccguuggcgaggcagauuacuucgaauaucaucaagagggggggcccgauggcgagccggacguaccacccggugcuaucgagcaagguccggcugacgauccuggugaagggccaaguaccggaccuagggggcagggcgacggugguaggcguaaaaaaggagggugguucggcaaacaucgcggccagggagggagcaaccccaaguuugaaaauaucgccgaagggcuacgagcuuugcucgcgaggucccauguggaacgaacuacagacgagggcaccuggguggcuggugucuucguuuauggcgggagcaagaccucccuguauaaucuaaggcggggcacagcccuggccauaccgcagugucgccugacaccccugucucgccugccuuuuggcauggcgccagggccaggaccacaaccugggccccugcgcgaaaguauuguguguuacuucauggucuuccugcagacacauauuuucgcagaaguccuaaaggaugcaauaaaggaucucguaaugacgaagcccgccccaacguguaauauuaggguuacggucuguaguuucgaugacgggguagaucucccccccugguucccaccuauggucgagggugccgcugcggagggggacgauggcgacgacggcgaugaaggcggggauggcgacgagggggaggagggacaggaa

SEQ ID NO: 6 - RNA, 1209 nt, Artificial Sequence
  Synthetic Polynucleotide
augucagacgagggcccaggcacgggcccuggaaacggacugggagagaagggggauaccucagggccagaggguaguggggguagcgggccucagagaagggggggcgacaaucacggucggggaagagggagagguagggguagaggaggaggccgucccggggcuccuggcgguuccggguccggcccucgccacagagauggcgugaggagaccucagaagcguccguccuguauugggugcaaggggacccacgguggcaccgguggcggagcuggggcaggaggugcuagaggaagaggcgguucagguggaaggggucgcggugguucaggaggacggcgcggccgggggagagagcgggcaagaggcggcagcagggagcgggcaagaggacgagggaggggccgaggcgagaagcgaccuaggucgccuaguucacagagcuccaguucugggucgcccccccggcggccgccuccugggcgaagacccuuuuuccaccccgugggggaggcugacuacuucgaguaccaccaggagggcggcccagacggagagcccgauguuccgccuggggccauugaacaaggcccugcagaugacccaggggaaggaccaucaaccggcccuaggggacagggcgauggggggagacggaaaaagggagggugguucgggaagcaccgcggccagggggggucuaauccgaaauucgaaaacauugccgagggccuccgugcuuuguuggcuagaucacacguggaaagaaccacggaugaaggcacguggguggcgggcgucuucguguauggugggaguaagaccucccuguauaaccucaggcguggcacagcccuugccaucccacagugcaggcucacaccccuuagcaggcuucccuuuggcauggcuccuggucccggcccccagcccgguccacugcgagaauccauuguauguuacuucaugguuuucuugcagacacauaucuucgccgaggugcugaaagacgccauuaaagaccuggugaugacaaagccugcccccacgugcaauauccgugugaccgucugcuccuuugaugacggagucgaccugccucccugguuucccccaauggucgagggcgcugcggcggaaggggacgacggcgaugauggugacgagggcggugauggcgacgaaggugaagagggucaggag

SEQ ID NO: 7 - RNA, 1209 nt, Artificial Sequence
  Synthetic Polynucleotide
augagcgacgaggguccaggcacaggcccggggaacggguugggagaaaaaggggacacuuccgguccagaaggcuccggggggagcggaccucagagaagagguggugauaaucacgggagagggagagggcggggcaggggacgugggggcgguagaccuggggcgccgggggguuccggcuccggaccacggcauagggauggugugcgaaggccgcagaagcggccgucuuguauaggcugcaaaggcacucacggugguaccggggggggagcaggagcaggaggcgcucgaggucggggcggguccggcggcagaggccgcggugguucugggggaaggaggggaagagggagagaacgcgcccgcggaggcucucgcgaacgggccagagggcgggggagggggcgcggggagaaaaggcccaggucgccaaguagucaguccuccaguagcggcagcccaccccgcagaccuccuccaggacgacgaccuuucuuucaucccgucggcgaggccgauuacuuugaguaccaucaggaaggggggccugauggagaaccggauguuccuccuggugcuaucgaacagggccccgccgacgauccaggcgagggccccaguacgggcccuagaggccagggagauggagguagaaggaagaaggggggaugguuuggcaagcacagagggcagggagguaguaaucccaaauuugagaauauugccgagggucugcgggcacuucuggcccggucucauguugagagaacgacugaugagggaacauggguggcuggcgucuuuguguauggcgguaguaaaaccagccucuacaauuuacggcgugggacagcgcuagcuauuccgcaaugccggcugaccccuuugucuaggcugcccuuugguauggcccccggccccggcccacagccugggccuuugcgggaaagcaucgucugcuacuuuaugguguuccuccagacccacaucuuugcagaggugcuuaaggacgccauaaaggaccugguuaugaccaaacccgccccuaccugcaauauccgcgucacggugugcuccuucgacgacgggguugacuugccuccaugguucccacccaugguagagggcgcugcugccgagggggaugauggagacgacggagacgagggcggcgauggcgaugaaggcgaagaaggccaggaa

SEQ ID NO: 8 - RNA, 1209 nt, Artificial Sequence
  Synthetic Polynucleotide
augucugacgaaggcccgggcacaggcccaggcaacggauugggcgaaaaaggugauacaagcgggccagaagggagcgggggcucugggccccagagacgggggggugacaaucacggccgaggaaggggaaggggcaggggaagaggcggaggacggccuggcgcuccuggaggcucuggcucagguccaagacauagggauggggucagaagaccacagaagagaccuagcuguauuggaugcaaggguacacacgguggcacgggcggcggugcuggcgcugggggcgcgagaggacguggagguucaggcgggagaggucgaggaggcucuggaggccgcagggggagaggacgagagagggcccggggggggucccgggaaagagcuagagggaggggacgcgggcggggggaaaagcggccucgcucuccuucuucucaaucuuccuccucugguucuccgccccgacgccccccaccgggcaggaggccauuuuuucacccugucggcgaggcagacuacuucgaguaccaccaagaaggaggcccagacggcgagccugaugugccgccaggugccaucgagcaggggccagcugaugacccgggggagggaccuagcacggggccccgcggucagggcgacggagggaggagaaaaaaaggugggugguuuggcaagcauagagggcaggguggcucaaacccaaaguuugaaaacaucgcagaaggucuucgggcucugcuggcccgcucucauguagagcgcacuacugacgaaggcaccuggguggccgggguguucguguacggaggaucuaagaccagucuguacaaccuccggagggggacagcucucgcuaucccccaguguaggcucaccccuuugagucgccuuccguucggaauggcuccuggcccgggcccccagcccgggccacuaagagagagcaucguaugcuacuuuaugguauuuuugcaaacccacaucuucgcugaagugcuuaaggacgccaucaaagaccuggugaugacaaaaccagcuccaacaugcaauauuaggguaaccguaugcuccuucgaugauggcgucgaccuuccaccuugguuccccccaaugguggagggagccgcagcagaaggagacgauggugaugauggagacgaaggcggggauggcgacgaaggagaggagggacaggaa

SEQ ID NO: 9 - RNA, 726 nt, Artificial Sequence
  Synthetic Polynucleotide
augggcagaagacccuucuuucaccccgugggagaagccgacuauuucgaguaccaccaggagggcgguccugacggcgagcccgacgugccuccaggcgccaucgaacagggccccgcugacgauccuggcgaggggccuuccacaggcccucgcggccagggagaugggggaaggcggaagaaggggggcugguuuggcaagcauaggggccagggcggcuccaaucccaaguucgagaauaucgccgaggggcuccgggcucugcuggcccggucgcacgucgaacguaccacugacgaggggacguggguggccggcgucuuuguguacggaggauccaagaccucccuguacaaccugagaagggggaccgcccuugccaucccucagugcagacucaccccccugagcaggcuccccuuugggauggcuccugggccaggcccccagcccgggccccucagggaaagcaucguguguuacuuuaugguguuucugcagacacacauuuuugcagaaguucugaaagaugcaaucaaggaucuggugaugaccaagccugcaccuacgugcaauaucagggugacaguaugcuccuucgacgacgguguggaccucccccccugguucccacccauggucgagggggccgccgccgagggagacgauggcgacgacggugaugaggggggagacggagaugaaggcgaggaggggcaggag

SEQ ID NO: 10 - protein, 242 aa, Artificial Sequence
  Synthetic Polypeptide
MGRRPFFHPVGEADYFEYHQEGGPDGEPDVPPGAIEQGPADDPGEGPSTGPRGQGDGGRRKKGGWFGKHRGQGGSNPKFENIAEGLRALLARSHVERTTDEGTWVAGVFVYGGSKTSLYNLRRGTALAIPQCRLTPLSRLPFGMAPGPGPQPGPLRESIVCYFMVFLQTHIFAEVLKDAIKDLVMTKPAPTCNIRVTVCSFDDGVDLPPWFPPMVEGAAAEGDDGDDGDEGGDGDEGEEGQE

SEQ ID NO: 11 - RNA, 726 nt, Artificial Sequence
  Synthetic Polynucleotide
augggacggagaccauucuuccaccccgugggagaagccgacuacuucgaguaccaccaggagggcgguccagacggcgaacccgacgucccuccuggagccaucgagcagggccccgccgacgacccuggcgagggcccuagcaccggaccuagaggacaaggcgacggcgggaggagaaagaaggggggcugguucgggaagcaccgcgggcaaggcggcagcaacccaaaguucgagaacaucgccgagggguugcgggcccugcucgcccguucccacguggagcggacaaccgacgagggaaccuggguugccgggguauuuguguacggcggcaguaagaccagccuguauaaccucagaagaggaacagcccuggccaucccacagugcaggcugacaccccucucccggcugccauuuggaauggcacccgggccuggaccccagccuggcccacugcgcgagucuaucguguguuacuuuauggucuuccugcaaacccacaucuucgccgagguuuuaaaggaugccaucaaagaccucgugaugacaaagcccgcucccaccugcaauaucagagugaccguaugcagcuuugacgacggcguggaccugccucccugguucccuccuaugguggagggcgccgccgcagaaggggacgacggugacgauggcgaugagggaggggauggagacgaaggcgaggagggccaggag

SEQ ID NO: 12 - RNA, 726 nt, Artificial Sequence
  Synthetic Polynucleotide
augggccgcagacccuucuuucaccccgugggagaggccgacuauuuugaguaccaccaggagggcgggcccgacggcgaaccugacgugccaccuggcgccauugaacaaggcccagccgacgacccuggggagggcccuagcacagggcccaggggccagggagacggggguaggcguaagaagggaggcugguucgguaagcaccgcggccaggguggcagcaacccuaaauucgagaauauugccgaaggucugcgagcccucuuggccagaagccacguggaacgcacuacugaugagggcaccugggucgccggaguguucguguacggcggaagcaaaaccagucuguacaaccugcgccggggaaccgcucuugccaucccccagugucgccugaccccauuguccagacugccauuuggcauggcccccggccccggcccccagcccggcccccugagggagagcaucgugugcuacuucaugguguuccugcagacccacauauucgcugaggugcugaaggacgccauuaaggaccuggugaugaccaagcccgccccuaccugcaacauccgcgucaccgucuguaguuucgaugacggcguggaucucccaccaugguuuccuccaaugguggagggcgcugcugccgagggggacgacggagacgacggagacgagggcggggacggggacgaaggcgaagaggggcaagag

SEQ ID NO: 13 - RNA, 726 nt, Artificial Sequence
  Synthetic Polynucleotide
augggacggagaccuuucuuucaccccguaggugaagccgacuacuuugaauaccaccaggagggcggcccagacggcgagcccgacguuccccccggggcuaucgagcaggggccugcggacgacccaggagagggaccuagcacuggaccccgaggucagggcgauggggggcgaagaaagaagggcggcugguucggcaaacauaggggccagggcgggucuaacccaaaguucgagaacauagccgagggccugagagcccugcuggcaagaagccacguggagcgaaccacagaugaaggcaccuggguggccggcguguucguguacgggggcagcaagaccucccuguauaaccucagaagagggaccgcccuggccaucccccagugccgacugaccccccugagcaggcugcccuucggaauggccccuggucccgguccccaaccgggcccgcuucgggaguccauagugugcuacuucaugguguuccugcagacacacaucuucgccgaggugcugaaggaugcaaucaaggaccuggugaugaccaagccagcucccaccugcaacauccgggugaccgugugcagcuuugaugacggcguggaccugccacccugguucccgccuaugguggagggcgcugcagccgagggcgacgacggggacgacggcgacgagggcggagauggcgacgagggcgaggagggccaggag

SEQ ID NO: 14 - RNA, 726 nt, Artificial Sequence
  Synthetic Polynucleotide
augggcagacggcccuucuuccaccccgugggcgaagcagacuauuuugaguaucaccaggaggggggccccgacggcgagccagacgucccaccuggugcaaucgagcaaggucccgccgacgacccuggggagggccccagcaccggccccagaggccagggggacgggggcaggagaaaaaaggguggcugguucggcaagcacagagggcagggggggagcaacccaaaguucgagaacaucgccgagggcuugagagcacugcuggccagaagccacguggagagaaccaccgaugagggaaccuggguugcuggcguguucgucuacggcggcagcaagaccagccuguacaaccuuagaagaggcaccgcccuggccaucccccagugccgccugacaccgcugagcagacuccccuucggcauggcuccuggccccggcccccagcccgggccccugagagagagcaucgugugcuacuucaugguguuucuucagacgcacaucuucgcugagguccugaaagacgccauuaaggaccuggugaugacaaaaccagcuccgaccugcaacaucagggucacugucuguagcuucgacgauggcguggaucucccucccugguuccccccaaugguggagggcgcugccgcugagggggacgacggcgacgacggggaugaaggcggcgacggcgacgagggggaagagggccaggag

SEQ ID NO: 15 - RNA, 1158 nt, Artificial Sequence
  Synthetic Polynucleotide
auggagcacgaccuggagagggggccaccaggccccaggcgacccccaagaggaccaccacugagcuccagccugggacuggcccuccugcuguugcuccucgcuuuacuguuuuggcuguauauagucaugucugacuggacaggcggggcauuauuggugcucuacagcuuugcacugaugcucauuaucauuauucugauuaucuuuauuuuuagacgggacuugcucuguccauuaggcgcgcuguguauuuugcugcugaugaucacacugcugcugauugcgcuguggaaccuccacggucaggcccuuuuucucggcaucgugcuguuuaucuuugggugccucuuggugcuugggauuuggaucuaccuucucgaaauguuauggcggcucggcgcuacaaucuggcagcuccuggccuucuucuuagcauuuuuucuggaucugauccugcugauaauagcccuguaccuacaacagaacugguggacucugcugguugaccuguuauggcugcuccuguuccucgccauucucauuuggauguacuaccacgggcagcgucauucagacgaacaccaccacgaugauagccugccgcacccucaacaagcuacggaugacuccggacacgaguccgauaguaacuccaacgagggacgccaucacuugcuggucucuggggcuggcgacgggccuccacuguguagccaaaaucugggagcccccggcgggggcccugauaaugggccucaggauccugauaacacggaugauaacggcccacaggauccagauaauaccgacgauaauggaccucaugauccucuuccacaggaucccgacaauacagaugacaaugggccgcaggauccagacaauacugacgauaauggcccacaugauccccugccacacagccccucagacucagcgggaaaugauggcgggcccccacaguuaaccgaggaaguggaaaacaaagggggagaucaggguccuccccucaugacagauggcgggggcggccacagucaugauagugggcacggggguggcgauccacaucuccccacacugcugcuaggcagcuccgguagcgggggagaugaugacgauccccacggcccugugcaguugagcuauuacgac

SEQ ID NO: 16 - protein, 386 aa, Artificial Sequence
  Synthetic Polypeptide
MEHDLERGPPGPRRPPRGPPLSSSLGLALLLLLLALLFWLYIVMSDWTGGALLVLYSFALMLIIIILIIFIFRRDLLCPLGALCILLLMITLLLIALWNLHGQALFLGIVLFIFGCLLVLGIWIYLLEMLWRLGATIWQLLAFFLAFFLDLILLIIALYLQQNWWTLLVDLLWLLLFLAILIWMYYHGQRHSDEHHHDDSLPHPQQATDDSGHESDSNSNEGRHHLLVSGAGDGPPLCSQNLGAPGGGPDNGPQDPDNTDDNGPQDPDNTDDNGPHDPLPQDPDNTDDNGPQDPDNTDDNGPHDPLPHSPSDSAGNDGGPPQLTEEVENKGGDQGPPLMTDGGGGHSHDSGHGGGDPHLPTLLLGSSGSGGDDDDPHGPVQLSYYD

SEQ ID NO: 17 - RNA, 1158 nt, Artificial Sequence
  Synthetic Polynucleotide
auggagcacgaccuggagcgcgggccuccaggaccccgacggccgcccagggggccaccgcugucauccagucugggccuugcucuguugcuguuacuccuugcccugcuauucugguuguacaucgucaugagcgauuggacagggggugcucugcugguguuguacagcuuugcgcugauguugauuauuaucauccugauuaucuuuauauuucgaagggaccuccuuuguccccugggagcgcugugcauacugcucuuaaugaucacguugcuccucauugcuuuauggaaucugcacggacaggcucuauuccucggcaucguuuuauucauuuucgggugccuccuugugcugggaaucuggaucuaucugcuagagaugcuguggcggcucggcgccaccauuuggcagcuucuggcauuuuuccuagcguuuuuucuggaucucauccuacuuauuaucgccuuguauuugcagcagaacugguggacucuccugguggaucuccuguggcuccuccuguuccucgccauauugauauggauguacuaccacggacagcgccacagcgacgagcaccaccacgaugauagucugccucacccucaacaggcuacagaugacucaggccacgaaagcgauuccaacucaaaugaaggccggcaccacuuguugguguccggagccggcgacgggccaccacucugcagccagaaucugggcgcucccggcggagguccagacaaugggccacaggacccugauaacacggaugauaacggaccgcaggauccugacaauacagaugacaacggcccgcaugauccacugccucaggauccugauaauacugacgauaacggaccccaggauccugauaacaccgacgacaacgggccucacgauccccuaccccauuccccaucugacucugcuggcaacgauggcggcccaccgcagcugaccgaagagguagaaaacaagggcggggaucagggcccuccacugaugacagacggcggcgggggacacucccaugauucgggccaugggggaggggauccucaccuucccacacucuugcugggaaguagcggguccggcggggacgaugaugauccccaugguccaguccaguugucauauuacgau

SEQ ID NO: 18 - RNA, 1158 nt, Artificial Sequence
  Synthetic Polynucleotide
auggagcacgaccuugagcgggguccaccaggcccacggcgcccuccgcgcgggccuccuuugucauccucccugggacuggcacugcugcuguugcuucuggcccugcuguucuggcuguacaucguuaugucugauuggacaggaggagcucugcugguucuuuacucuuucgcgcugaugcugaucaucaucaucuugaucauuuucauuuucagacgagaccuccuuuguccucucggagcccuguguauccuccugcugaugauaacccuucugcugauugcuuuguggaaucugcaugggcaagcucuguuucuuggaauugucuuauuuauuuuugggugucugcugguguugggaaucuggaucuaucuucuugaaaugcuguggcggcugggcgccacaaucuggcagcuacucgccuuuuuccuagcuuucuuuuuggaucugauucugcugauuauugcucucuaccugcagcagaauugguggacccucuuagucgaucugcuguggcuguugcucuuucucgccauccugauuuggauguacuaucaugggcagcgccauagugaugaacaucaucacgaugauucccugccacauccucagcaggccacagaugauucaggccacgaaucagacagcaauagcaaugagggccgccaccaccugcugguuucaggggccggugacggcccuccauugugcagucagaaccugggagccccgggggguggaccugauaacgggccgcaggauccugacaauacugaugacaacggaccccaggauccagauaacacugacgacaauggcccccaugacccccuaccccaggaucccgacaauacagacgacaacggaccgcaggaccccgacaacacugaugauaaugggccacacgauccucugccucacucuccaucagacucugccggaaaugacgguggaccgccacaguuaacugaagaagucgaaaacaagggcggcgaucaggggccgccgcucaugacagauggcgggggaggucacagccacgauagcggacacggaggaggugacccucaucugccuacacuucuguuggguagcucugggagugggggggaugacgacgacccucacggaccuguucagcucucauacuacgac

SEQ ID NO: 19 - RNA, 1158 nt, Artificial Sequence
  Synthetic Polynucleotide
auggaacacgaucuugaacgggggccgccgggaccgaggaggccgccacgggggcccccccugagcaguagcuuggggcuugcgcugcuucuccugcuguuggcccuccuguuuuggcuguauauugugauguccgacuggaccggcggcgcccugcucguccuguauagcuuugcuuugaugcugauaauuauuauauugaucaucuuuauuuuccggcgugauuugcucuguccucuuggugcccuuuguauccugcuguuaaugaucacucugcuccucauugcccuauggaaccuccacggacaagcccuguuucuuggcaucguucucuuuauauucggaugccucuuagugcuugggaucuggauauaccuguuggaaaugcuguggaggcuuggagccacgauauggcaauuauuggcauucuuucuggccuucuuccuggaucugauccuguugauaauugcucuguaccugcagcagaacugguggacacuacuuguugaccugcucuggcuacuccuguuccuugcgauccugauuuggauguacuaucacggacagagacacuccgacgagcaucaucacgacgauuccuuaccacacccucagcaggcgacagaugauucuggccaugagagcgauuccaacagcaacgagggccggcaccauuugcuggugucgggggcuggagacgggccuccguuauguagccaaaacuugggcgcgcccggcggcgggcccgauaacggcccgcaggacccggacaauaccgacgauaaugggccucaagaucccgacaauacugaugacaauggaccacacgauccucugccacaggaucccgacaacacagaugacaaugggccgcaagaccccgacaauacagacgauaauggcccccacgacccacuaccacauucucccucugacagugcggggaaugaugguggucccccacaacugaccgaggagguggagaauaaggggggggaccaagguccaccccucaugacugauggaggaggaggacacucgcacgauucaggucacggcgggggggacccucacuugcccacucugcugcugggcagcagcgguucugggggcgacgaugaugauccccacggcccggugcagcuaaguuauuacgac

SEQ ID NO: 20 - RNA, 1158 nt, Artificial Sequence
  Synthetic Polynucleotide
auggagcacgauuuagagaggggcccaccuggccccaggcgcccaccuagaggcccacccuugucgucgucauuagggcuggcauugcuccugcuccuccuggccuugcuguucuggcuuuacaucgugaugagcgacuggacuggcggggcccugcugguccucuauagcuuugcacugaugcugauuauaaucauauugaucaucuucaucuuccgacgggauuuacuuugcccccugggggcauuauguauucuauugcugaugauaacacuucugcuuauugcuuuauggaaucuacacggucaggcucuuuuucugggaaucgugcucuuuaucuuuggaugccuucugguacuaggaauuuggauauaccucuuagaaaugcuguggcggcucggcgcaaccaucuggcaacuccuugcguuuuuucucgcguuuuuccucgaccugauucugcuaauaaucgccuuauaccuucagcagaauugguggacacuccugguggaccugcuguggcuccugcuauuccuugcaauccucauuuggauguauuaccauggccagaggcacucugaugagcaccaccacgaugauagucuaccucauccacagcaggcuacggacgauucagggcaugagucagauucuaauuccaacgaaggaagacaccaucuguuggugucaggggccggagacggccccccucuguguagccagaaccucggggcaccagggggagguccugacaaugggccgcaagacccugacaauacugaugauaauggcccccaagauccugacaauaccgaugacaacggcccgcacgacccccugccgcaggauccggauaacaccgacgacaauggaccccaggaccccgauaacacggacgauaacggcccucacgaucccuuaccccauucuccguccgacucugcagggaacgacgggggcccuccucaguuaaccgaagaggucgaaaauaaggggggagaccagggccccccauuaaugacagacgggggcggcggucacagucacgacucaggucacggcggcggggacccccauuugccuacacugcuguuagggucuucuggcucaggcggggacgaugaugauccacacgguccggugcagcugucauauuaugau

SEQ ID NO: 21 - RNA, 1491 nt, Artificial Sequence
  Synthetic Polynucleotide
auggguagucuugagaugguaccaaugggcgcagguccaccgagcccuggaggcgauccugacggguacgacgggggaaauaacucgcaauaucccucagccucaggcucaucggguaauacuccgaccccuccaaacgacgaggaaagggaauccaaugaggaaccgccuccaccauaugaggauccguacugggggaacggugauaggcacagugacuaccagccacuugggacacaagaccaaagccuguaccucggacuucagcacgaugguaacgacgguuugccgccucccccuuauagcccuagagaugauagcucccagcauauauacgaggaggcugguaggggcuccaugaauccaguaugcuugcccguuaucguagcccccuaccucuucuggcuugcggcgaucgcagcuagcuguuuuacagcuuccgugagcacagucguaaccgcgacaggacuggcacugucucuacuccucuuggcagcgguugccagcagcuacgccgccgcucagcggaaacugcucaccccuguuacagucuuaacugcaguugugaccuucuucgccauuuguuugacauggaggaucgaagauccuccauuuaauagucuccuguuugcacugcuggccgcugcgggcgggcuacaagggauauaugugcuaguaaugcucguccuacuuauucuggccuauaggcggagguggcggcgccugacagugugcggagggauaauguuccuagccugugugcucgugcucauuguggacgcuguucuacaguugucuccucugcugggugcagugacgguggucucaaugacccugcuguuacuugccuucgugcuuugguugucaucuccagggggacugggcacacugggcgccgcccuguuaacccuggcggccgcucuggcacuccuggccucacugauucugggaacucugaaucucaccacuauguuucuucugauguuauuguggacuuuggugguguugcugauuugcagcuccugcaguucuugcccccuauccaaaauauuacuggcgcggcuguuccuuuaugcccucgccuuacugcugcucgcuagcgccuuaauugcugggggcuccauucuucagaccaacuuuaaaucccuguccagcacugaauucauccccaaccuuuuuugcaugcugcuccuaaucguggcugggauucuguuuauucuggccauuuugaccgaguggggcaguggcaacaggaccuacggcccuguguucaugugucugggggggcucuuaacgauggucgcuggcgcugucuggcucacggugaugaguaacacuuugcucagcgcguggauccugacagccggcuuucucauuuuucugauuggguucgcuuuguuuggagucauucgguguugccgcuauugcuguuacuauuguuugacauuggaguccgaggagaggccacccacccccuaccgaaauacggua

SEQ ID NO: 22 - protein, 497 aa, Artificial Sequence
  Synthetic Polypeptide
MGSLEMVPMGAGPPSPGGDPDGYDGGNNSQYPSASGSSGNTPTPPNDEERESNEEPPPPYEDPYWGNGDRHSDYQPLGTQDQSLYLGLQHDGNDGLPPPPYSPRDDSSQHIYEEAGRGSMNPVCLPVIVAPYLFWLAAIAASCFTASVSTVVTATGLALSLLLLAAVASSYAAAQRKLLTPVTVLTAVVTFFAICLTWRIEDPPFNSLLFALLAAAGGLQGIYVLVMLVLLILAYRRRWRRLTVCGGIMFLACVLVLIVDAVLQLSPLLGAVTVVSMTLLLLAFVLWLSSPGGLGTLGAALLTLAAALALLASLILGTLNLTTMFLLMLLWTLVVLLICSSCSSCPLSKILLARLFLYALALLLLASALIAGGSILQTNFKSLSSTEFIPNLFCMLLLIVAGILFILAILTEWGSGNRTYGPVFMCLGGLLTMVAGAVWLTVMSNTLLSAWILTAGFLIFLIGFALFGVIRCCRYCCYYCLTLESEERPPTPYRNTV

SEQ ID NO: 23 - RNA, 1491 nt, Artificial Sequence
  Synthetic Polynucleotide
augggauccuuggaaauggugcccaugggagccggaccccccucaccagggggagacccagacggauacgacgggggaaacaauucucaguauccgagcgcguccggcagcucaggaaacacacccaccccccccaacgacgaggagagagaauccaacgaggagccuccucccccauacgaagacccuuacugggggaauggagaccgucauucugacuaucaaccucuaggcacucaggaccagucucuuuaccuaggguuacaacacgaugguaaugauggguugcccccgccgcccuauaguccccgggacgacaguagucagcauauauaugaggaagccggcagagguucuaugaaucccguuugucuaccggucauugucgcccccuauuuauucuggcuugcagccaucgccgcuucgugcuucaccgccuccguguccacgguggugacagcuacagggcuggcacucucucugcuacuccuggcugcuguggccagcuccuacgcagcggcucagcggaagcuucucacuccuguaacuguccucaccgcgguagugaccuuuuuugccauaugccugacauggaggauugaggacccacccuuuaauucucugcuguuugcgcuuuuggccgcugccggaggacugcaagguauuuaugugcugguaauguugguucuacuuauucucgcauaccggcgacgguggcggaggcugacuguaugcggggggauuauguuccuggcguguguucugguuuugaucgucgaugccgugcugcaguugucaccgcugcucggggcggucaccguugugaguaugacacugcuucugcuggcuuucgugcucuggcuaucuucccccggggggcuggggaccuugggcgcugcgcuucugacucuggcagcugcucuggcccugcuggccucucuuauucuuggcacacugaauuugacuaccauguuccucuugauguugcuguggaccuuaguugugcugcugaucuguucuuccuguagcagcuguccacuguccaagauucuccuggccagguuguuucuguaugcccuagcgcugcugcuguuagcuucugcucugauagccggcggcaguauccugcaaaccaacuucaagagccucuccagcacagaauucaucccuaaucucuuuugcaugcuacugcucaucguggcaggcauacuguucauucuugcuauccugacugaauggggcucuggcaauagaacauacgggccaguguucaugugcuugggcggccuguugacaaugguugcuggagccguguggcugacgguaauguccaacacucugcugagcgcauggaucuuaacagccggauuccugaucuuuuuaaucggauucgcacucuucggagugauccggugcuguagguauuguuguuauuacugccugacacucgagucggaagagaggcccccuacaccuuaccggaauacaguu

SEQ ID NO: 24 - RNA, 1491 nt, Artificial Sequence
  Synthetic Polynucleotide
auggggucguuggagaugguccccaugggcgcugguccuccaagccccggcggggacccggacggauacgacgggggcaauaauagucaguauccgagugcaagcggaagcagugggaauacgccuacaccaccaaacgacgaggagcgggagucuaacgaggagccuccacccccuuacgaggauccuuacugggggaacggagaucgacauucugacuaccagccuuuagggacacaggaucagucucucuaucucggacugcagcaugauggcaacgacggacugcccccaccaccuuauucuccacgcgacgacagcucacagcacauauacgaagaggccgggcgcgggucuaugaacccgguuugccugccagucaucgucgcacccuaccucuuuuggcuggcggccauugccgcguccuguuucacagccucagugucgacugugguaaccgcaacagggcucgcacucagccuacugcugcucgcugccgucgcguccucuuaugcugcugcccagcgcaaacugcucaccccaguuacggugcucacugcuguuguuaccuuuuucgcuauuugucucaccuggagaaucgaagacccgccguucaacagucuguuauuugcccucuuggcugcagcaggcggccuucagggcaucuauguccuggugaugcugguccugcucauccuggcuuacaggagaagauggcgucggcugaccgugugugguggcaucauguuucucgcguguguucuggugcucaucgucgaugccgugcuacagcugagcccacugcuuggagccgugacagucguuagcaugacacuccugcuauuggcuuucgugcucuggcugaguagcccaggugggcucggcacacuuggugccgcgcuuuuaacacuggccgcggcccucgcacugcuggccucucuaauucucggaacauugaaccugacaaccauguuccuccugaugcuccucuggacacuggugguacuguuaaucuguagcucuugcucaucaugcccacugagcaagauacuccuggcgagacuuuuccuauacgcccuggcccugcugcuguuggcaucggcucugaucgcugggggaagcauccuucaaacaaauuucaagagccuuagcaguacugaguuuauaccuaaccuguucuguaugcuucugcugauagucgcugggauacuuuuuauucuggcaauccuaacagagugggggucagguaacaggaccuaugggccuguuuuuaugugccucggaggccuccucaccaugguugccggcgcaguuugguugacagugauguccaacacccuacugagugcuuggauacugacggccggguuccugauuuuccuaauaggauuugcccuguuugggguuauccggugcugccguuacugcugcuacuauuguuugacccuugagucugaagaaaggccgcccacccccuacagaaacacugua

SEQ ID NO: 25 - RNA, 1491 nt, Artificial Sequence
  Synthetic Polynucleotide
auggggucauuggagauggugccuaugggggccggcccacccagcccagggggcgauccugacggauacgacgggggcaauaauucacaauauccuagcgccagcggaucuucugggaauacccccacaccaccuaacgacgaggaacgggagucaaacgaggaacccccaccgccguacgaggacccauacugggggaacggggaucgacacucagacuaccagccucucggaacgcaggaucaaagccuguaccugggacugcagcacgaugguaacgauggacugccaccaccuccuuacaguccaagggaugacuccagccagcacauuuaugaagaagccggccgagguaguaugaauccagugugucugcccgugauugucgccccuuaucucuuuuggcuggccgccauugccgccagcuguuucaccgcgucgguuucaaccguagugaccgccacaggccuggcucucagcuuguuacuguuggccgcuguggcgagcuccuacgccgccgcccagcgcaagcuacuuaccccugugacagugcugacggcggugguuacauucuucgccauuugccugaccuggcgaauugaggauccaccauucaauuccuuauuguuugcccuccucgccgcugcuggagggcuccaggguaucuacgugcuggugaugcucguuuugcugauauuggcuuaccggcggcgcuggcgccgccuuaccgucugcggaggaaucauguuuuuggcaugcgugcucguucucauuguggaugcuguuuugcagcugucaccccuguugggugccgugacaguuguaaguaugacccugcuccugcucgcauucgugcucuggcugagcucucccggggggcugggcacucucggagcagcucugcugacacuagccgcagcacuagcccuucuggccagucuuauccucggaacgcugaaccugacgaccauguuccuccugauguugcucuggacccucguagugcuguuaauaugcucuagcuguagcuccugcccucugagcaagauucuccuugcuaggcuguuccuauacgcccucgcucuccuauugcuggcgagcgcucucaucgccggugggagcauccugcagacuaacuucaagucccugaguucaacagaauucauucccaaccucuuuuguaugcugcugcuuaucguggccggcauccucuuuauccucgccaucuugacugaguggggguccggaaaucgcacauauggcccaguuuucaugugucuggggggccugcucacgaugguggccggcgcaguguggcugacgguaaugucaaacacuuugcucucugcguggaucuugaccgcaggcuuccugaucuuuuugaucggcuucgcccuguucggugucauccggugcugcagauacugcugcuacuauugccucacacucgaauccgaagagaggccucccacaccuuaccgaaauacagug

SEQ ID NO: 26 - RNA, 1491 nt, Artificial Sequence
  Synthetic Polynucleotide
auggggucuuuagaaaugguccccaugggugccggcccacccucgccaggaggcgauccagacggcuacgacgggggaaacaacagccaguaccccagcgccagcgguagcagcggcaacaccccgaccccaccaaacgacgaagagcgggagagcaaugaggagcccccaccccccuaugaggacccuuacuggggaaauggcgaucgacacagcgauuaccagccccugggcacacaggaucagagccuguaccugggcuugcagcaugaugguaacgacgggcuuccgcccccaccauacucacccagagacgauucaagucagcacaucuacgaggaggcugguagggguaguaugaauccugugugucucccugugaucgucgcccccuaccuauuuugguuagcugcgaucgcugccuccugcuucaccgcuagcgugucaacagugguuacggcaaccgggcuggcguuaagucugcuucugcuugcggcaguggcaucuucuuaugcagcggcccagcggaagcuuuugaccccugugacaguacugaccgcagugguuacguuuuuugcgauuugcuugacguggagaauagaggaucccccuuuuaacucacugcucuuugcacugcucgcggcugcugggggccugcaggggauuuacguccucguuaugcuggugcuccugaucuuagccuacagaaggagauggcgccgacugacaguaugcggggggauuauguuuuuggcauguguacucguauugaucguggaugccgucuugcagcuuuccccccugcugggcgcagucaccgucgugaguaugacucugcuguuacuggccuucguacuguggcuuagcagcccuggaggacuaggcacgcugggcgccgcuuuauugacccuggcagccgcccuggcucugcuggccucccugauacuggggacauuaaauuuaacaacuauguuucugcugaugcugcuguggacucuaguugugcucuugauauguuccuccuguuccagcugcccucugagcaagauccuguuggcucggcuauuccuguacgcgcuggcucuccuccugcuagcuucagcgcuaauugcaggcgggucuauucuccagacgaauuuuaagagccucaguagcacugaguuuaucccgaaucuguucugcauguugcuauugaucgucgcaggcauucucuucauucuggccauacuuacagagugggguagcggcaaccggacuuauggcccuguguucaugugcuuggggggccuucucacaaugguggcaggggcgguauggcugaccgugaugucuaacaccuuguuaucagccuggauccuuaccgccggcuuccuaauuuuucugaucggcuucgcccucuucggaguaauacgaugcugucgguacugcugcuacuauugccuuacuuuggagagcgaagagcggccucccacucccuauagaaacaccguu

SEQ ID NO: 27 - RNA, 2595 nt, Artificial Sequence
  Synthetic Polynucleotide
auggaggcagcacugcuggucugccaguauacaauccagucgcucauucaucugacaggcgaggaccccggcuucuuuaacguggaaaucccagaguucccuuucuauccaaccuguaacguuugcacugcugacgugaacgugacaaucaauuucgacgugggaggaaagaagcaucagcuugaucuggauuucggccaacugacgccacacaccaaagcgguguaccaaccaaggggugcauuuggagggagcgagaaugcuacaaaucuguuuuuacuggaacugcuuggugcaggagagcuggcacuaaccaugcgaagcaagaagcuccccaucaacguuaccaccggggaagaacagcaagucagccuugaauccguggauguguacuuucaggauguuuucggcaccauguggugucaccacgcugagaugcagaaucccguguaucucauacccgagacuguacccuacaucaagugggauaauugcaauucaacuaauauuacggcuguggugagggcccagggcuuggacgugacucugcccuuaucucuaccuacuucugcccaagacuccaauuuuucugucaagaccgagaugcucgggaaugagaucgauaucgagugcaucauggaggacggugagauaagccagguucugcccggcgacaacaaguucaauaucacuuguucuggcuacgagucccaugugccuagugguggcauacucacaaguacuucucccguagccacccccauucccggaaccggauacgccuacagucugcgucugaccccacggccuguguccagauuccuggguaacaauaguaucuuauacguguuuuauagcggaaacggcccuaaagcguccggaggggacuauuguauucagaguaauaucguuuucucugaugagauuccugccagucaggacaugccgacaaacacaacugauauuaccuacgugggcgacaaugccacguauucagugcccauggucacgagcgaggacgccaauucaccaaauguuacuguaacagcuuuuugggccuggccaaauaacacugagacugacuucaaauguaaguggacuuugaccucuggaacuccgucggguugcgagaauaucagcggggccuuugcuuccaacaggacuuucgacaucacugucucagggcuggggacagcaccgaaaacauuaaucauaacacggaccgccaccaacgccacgacuacaacccauaaggugaucuuuuccaaggcaccugaguccaccacuaccuccccgacucuuaacacuacgggcuucgcugaucccaacaccacuacgggguugccuagcucgacacaugugccgacgaaccugacugccccugcaucgaccgggcccacaguuucgaccgccgaugugacaucaccaacccccgcagguacaaccucaggcgccagcccagugaccccuuccccaagccccugggauaauggaacggaguccaaggcuccugauaugacuuccucuaccagccccgugacuacacccacucccaacgcaacuagcccaaccccagcugugacgacccccaccccgaacgcgacaucucccacaccugcugugacaaccccaaccccuaacgccacuagcccuacccuagguaagaccaguccgacuagcgccguuacaaccccuaccccuaacgcaaccggcccgaccgugggcgagacuuccccgcaagccaaugcgacaaaucacacauugggcgggaccucuccuacaccagucguuacaucucagccuaagaacgcuaccuccgcugucacuaccggacagcacaacaucaccagcucaagcacgaguuccaugagcuugcggccgagcucaaaucccgagacccuaucaccauccacaucagacaacaguacuucacacaugccacucuugacgagcgcucaccccaccggcggcgagaacaucacccaggugacuccggcgucuauuuccacccaccacgucagcacgucgucucccgcaccgagaccagggacgacuucucaggccagugggccuggcaacuccucuacaagcacaaaaccaggcgaaguuaacgugacaaaaggaacgcccccccagaacgcaaccaguccucaggcccccagcgggcagaaaacugcggugccaacugugaccagcaccgguggcaaggccaacucaacaacuggaggcaagcauacgacggggcacggcgcccggaccuccacugaacccacgaccgauuacggaggugacagcacaacaccgcggccacgauauaaugccaccacuuaucugccaccauccacaagcuccaagcugcggccacgguggaccuucacaagcccacccgugacgacugcccaagcgacggugccagugcccccuacaagccagccacgcuucuccaaccuuaguaugcucguucuccagugggccagccuugcuguucugacccuccuccugcugcucgugauggccgauugcgccuuuaggagaaaccucagcacuagccacacguacaccacgccccccuacgaugacgccgagacuuacguc

SEQ ID NO: 28 - protein, 865 aa, Artificial Sequence
  Synthetic Polypeptide
MEAALLVCQYTIQSLIHLTGEDPGFFNVEIPEFPFYPTCNVCTADVNVTINFDVGGKKHQLDLDFGQLTPHTKAVYQPRGAFGGSENATNLFLLELLGAGELALTMRSKKLPINVTTGEEQQVSLESVDVYFQDVFGTMWCHHAEMQNPVYLIPETVPYIKWDNCNSTNITAVVRAQGLDVTLPLSLPTSAQDSNFSVKTEMLGNEIDIECIMEDGEISQVLPGDNKFNITCSGYESHVPSGGILTSTSPVATPIPGTGYAYSLRLTPRPVSRFLGNNSILYVFYSGNGPKASGGDYCIQSNIVFSDEIPASQDMPTNTTDITYVGDNATYSVPMVTSEDANSPNVTVTAFWAWPNNTETDFKCKWTLTSGTPSGCENISGAFASNRTFDITVSGLGTAPKTLIITRTATNATTTTHKVIFSKAPESTTTSPTLNTTGFADPNTTTGLPSSTHVPTNLTAPASTGPTVSTADVTSPTPAGTTSGASPVTPSPSPWDNGTESKAPDMTSSTSPVTTPTPNATSPTPAVTTPTPNATSPTPAVTTPTPNATSPTLGKTSPTSAVTTPTPNATGPTVGETSPQANATNHTLGGTSPTPVVTSQPKNATSAVTTGQHNITSSSTSSMSLRPSSNPETLSPSTSDNSTSHMPLLTSAHPTGGENITQVTPASISTHHVSTSSPAPRPGTTSQASGPGNSSTSTKPGEVNVTKGTPPQNATSPQAPSGQKTAVPTVTSTGGKANSTTGGKHTTGHGARTSTEPTTDYGGDSTTPRPRYNATTYLPPSTSSKLRPRWTFTSPPVTTAQATVPVPPTSQPRFSNLSMLVLQWASLAVLTLLLLLVMADCAFRRNLSTSHTYTTPPYDDAETYV

SEQ ID NO: 29 - RNA, 2595 nt, Artificial Sequence
  Synthetic Polynucleotide
auggaggcugcucuauuggugugccaauacaccauucagucgcugauccacuugacuggggaggaucccggauuuuucaacguggagauuccggaauucccuuuuuaccccaccugcaacgugugcacugccgacguaaacgugaccauaaacuuugacgucggugggaagaagcaccagcuggaccuggacuucgggcaguuaacaccccacacaaaggcaguuuaccagcccagaggagccuucggcggaucggagaaugcaacaaaucuuuuccugcuagaacugcucggcgccggcgaguuggcccugacaaugagaagcaagaaacuuccuaucaacguaaccacaggggaggagcagcaggucagccucgaaaguguugacgucuauuuccaggaugucuuugggacuauguggugccaucacgccgaaaugcagaaucccguguaccucauucccgagacaguacccuauaucaagugggacaacugcaacucuacuaauauuacagccguggugcgcgcucagggacuugauguaacauugccuuugucuuugcccacaagcgcucaggauucuaauuucucuguaaagacggagaugcuggggaaugaaaucgacauagaauguauuauggaagacggugaaaucagucaggugcuaccgggagacaacaaauucaauauuacauguucuggcuaugagagccacgugccgagcgggggcauccugacuucgacuucucccgucgccacacccauaccaggcacaggcuacgcuuauagucugaggcugacucccaggccaguaucccgauuucuggguaauaauuccauccuuuauguguuuuacuccgguaacggccccaaagcuucggggggcgacuauuguauccagucuaauauaguguucuccgaugagauucccgcgagucaggauaugcccaccaacaccaccgacaucacguauguuggggauaacgcuaccuauagugugccgauggugacauccgaggacgcaaacucuccuaacguaaccgugaccgccuuuugggcauggccaaauaauaccgaaaccgauuuuaaaugcaaguggacccugacauccgggacucccuccggaugcgaaaauauuucuggagcuuuugccagcaaucggaccuuugauaucacugugagugguuuaggcaccgccccaaaaacacugaucauaaccaggacagccacaaaugcgaccacaacuacacacaaaguuauauuuaguaaagcaccugaguccaccacaacuucuccgacccucaacacuaccggcuucgcugauccgaauaccaccacaggucuuccaucuuccacccacguuccaacuaaucuuacggcgccugcuagcaccgguccaaccguguccaccgccgaugugacuagccccacgccggcuggaacaacaucaggggccagcccuguaaccccaagcccuucacccugggacaaugguaccgagaguaaggcgcccgacaugaccucaucaacuucuccuguuacaacuccaacaccaaaugccacuaguccuacccccgcagucacuaccccaacgccuaaugcaacgucaccaacuccugcagugaccacaccaacacccaaugcuacuucgccgacccugggcaagaccagcccaaccagugccgugacgacaccgacuccaaaugcgaccggaccuacugucggugagacaagcccccaggcaaacgcgaccaaccacacccucggcgggacuucuccaacacccgucguaacgucccaaccaaaaaaugcuacaucggccgugacuaccggacagcauaauaucaccucaagcuccacgucgucaaugagccugcggccgucaaguaauccagagacucugucgccaucuaccucagauaacucaacuagccacaugccucuacucacuagugcccaccccaccggcggggagaacaucacgcagguaacaccagcgucuaucaguacucaccaugugaguaccagcucccccgcuccucgaccgggaaccacgagccaggccagcggaccggguaauaguagcacuucuacuaaaccgggagaggucaaugugacuaaggggacucccccccaaaacgcuaccagcccacaggcucccucagggcagaagaccgcuguuccaacaguuacaucuacugggggcaaggcaaauagcacaaccgguggcaagcauacuacugggcacggugcccgcacaagcaccgagccuacaacggacuaugggggggauucuaccacaccacguccccgguauaacgccaccacguaucuuccgccuagcacaucaagcaaacucagaccucgcuggacauuuacaucacccccaguuaccacugcucaggcaaccgucccggugccuccuacuucacaaccacguuucagcaacuugagcaugcugguccugcagugggcuucccucgccgugcugacauuacuguuauugcuggugauggccgauugcgcguuucgcaggaaccugucuaccagccacacauacacaacgcccccguaugacgacgcagagacuuaugug

SEQ ID NO: 30 - RNA, 2595 nt, Artificial Sequence
  Synthetic Polynucleotide
auggaagccgcucuucuggucugccaguauacaauccagucgcugauucaucucaccggcgaggauccagguuucuuuaacguggagauuccagaauucccuuucuauccaacuuguaacguguguacugccgacguuaacguuacuauuaacuuugacgugggcggaaagaagcaccagcuggaucuugauuucggccagcuaacaccucauaccaaggccgucuaccaaccacgcggggcauuuggcgguucugagaaugcuacaaaccuguuccuuuuggaacuccucggagcaggggaacuggcacuuacaaugaggaguaagaagcugcccaucaacgucaccacgggggaagaacagcaggugucccuggaguccguugauguguauuuccaggacguuuucgggacaauguggugucaucaugccgaaaugcagaauccgguguaucucauuccugagaccgugcccuauauuaaaugggauaacuguaauucgacaaacauaacugccguagugcgugcccagggucuggauguaacuuugccucucucccuucccacuucugcccaggacuccaauuuuucagugaagaccgaaaugcuugggaacgagaucgacaucgaguguaucauggaggauggggagaucagucagguguugccuggugacaauaaguuuaauauaacauguuccggcuaugaaucacauguuccaagcggagguauucucacaaguacaucucccguagccacgccgauuccgggaaccggauacgccuauucacuucggcugacuccucggccagugucacgauuccugggcaauaacucaauucuguacgucuuuuacagcggcaacggcccaaaggccaguggaggcgauuacuguauccagucuaacaucguauuuucagaugagauuccagcaagccaagacaugccaacuaauacuacagacauuacauacgucggugauaacgccacuuauucagucccuauggucacauccgaggacgcgaacucacccaauguuaccguuaccgcauucugggcauggcccaauaauacggaaacagacuucaaauguaaguggacccugaccaguggcaccccuucuggcugcgaaaauauaagcggggcauuugcuagcaacagaacauucgauauuacugugucuggccuggggaccgcccccaaaacacucauuauaacgcgaacagcuacgaacgcuaccacaaccacacauaaagugauuuucagcaaggcuccagaaucaacuacaaccaguccgacccuuaauaccacaggcuucgcagacccgaacacaacgacgggacugcccuccucaacgcaugugccgacuaaucugacugcucccgcaaguaccggcccaacagucuccacagcagacgucaccucuccgacucccgccggcacuacaucuggagccucaccggugacuccuaguccuucccccugggacaaugggaccgagucuaaagccccggacaugacgaguucuaccucaccaguuacaaccccaacaccuaaugccacaagcccuacgccagccgugaccaccccuacccccaaugccaccagcccaacacccgcuguuacaacgccaacccccaacgcuacuucuccaacgcuaggaaaaacaucacccaccucagcuguaaccacccccacaccaaacgcuaccgggccaaccguuggcgaaaccuccccccaggccaaugcgacaaaccacacccuuggggggacuucucccacuccuguggugacuucacaaccgaagaacgcgacgucggccguuacgaccgggcagcacaauaucaccucguccuccacgucguccauguccuugcggccuuccaguaacccagagacacugucuccuaguaccagugacaacagcaccucucacaugccauuacugacuuccgcccacccaaccggcggagagaacaucacucaggugacccccgcaucuauuucuacccaccacgugagcacuagcagcccggcaccaagaccagggaccaccucccaggcuagcggcccgggcaacuccuccacuagcacgaaaccaggagaggugaacgugaccaagggcacaccgccacagaaugcaacuuccccacaggcccccuccggccagaaaacugcuguaccuacggucacuagcacuggcggaaaagcgaauucaaccaccggugguaagcauaccaccggacacggcgcucggacuagcacagagccaaccacugauuacgggggugacucaacgaccccgaggcccagguacaacgcaaccaccuaucucccaccauccacaucuuccaagcucaggccucguuggacuuucaccuccccgccugugacuacagcgcaggccacagugccagugccuccaacgucacagccgcgguuuagcaaucucuccaugcugguccugcagugggcaucucuggcaguccugacacugcuucuuuugcucgugauggccgauugugcguuuagacgcaaccuuucaacaucccacacauauacaacuccacccuaugaugacgcagagacuuaugug

SEQ ID NO: 31 - RNA, 2595 nt, Artificial Sequence
  Synthetic Polynucleotide
auggaagccgcccuauuagucugccaguacaccauucaaagccucauccacuugacuggggaggauccuggguucuuuaacguggaaaucccggaauucccuuucuacccaacuugcaacgugugcacggcugacgucaacgugacuaucaacuucgaugugggggggaagaaacaucaacuugaucuggacuuuggccagcuuacuccccacaccaaggccguguaccagccccgcggcgcauucggugggagcgagaacgcgacaaaucuauucuugcuggaacugcugggcgcaggagagcucgcccugacgaugcgaucuaaaaagcuucccaucaacguuaccacuggcgaggagcagcaggugucccucgaaagcgucgacgucuauuuccaagacgucuucggaacaauguggugccaccacgcugagaugcagaaccccguauaucuuauucccgaaaccgugccauacaucaagugggacaacugcaacucaacuaacaucacugcaguagugcgcgcccagggacuggacgucacuuugccacugucacugcccacaucagcccaagacagcaacuucagcgucaagacagaaaugcugggcaacgaaaucgacaucgaaugcauaauggaggauggggaaauuucccagguccuccccggugauaacaaguuuaauauuacuuguucuggauaugaaucccaugugccgucuggugguauacugacgaguacaucgccaguggcuaccccaauccccgggacaggcuaugccuacagccugagacugacgccaagaccaguuuccagguuucuggggaauaacucuauccuguauguguuuuauucugguaacggacccaaggcauccggcggugauuauuguauccagagcaauauaguguucucugaugagauuccggccucccaggauaugccaaccaacacgacagauaucaccuaugucggggacaacgccacauauagcgugccaauggugaccagcgaagaugccaauucucccaacgucacagugacagccuuuugggcguggccuaauaacacagaaacugacuuuaaaugcaaauggacucuaaccucaggcaccccaucuggcugcgagaacauaagcggcgcguuugcaucgaacagaacuuuugauauuacaguaucuggguugggcacugcccccaaaacucuaauaauuacacggacggccacuaacgccaccacgacgacucacaaggugaucuucagcaaagcucccgaaucuacuacuaccucgccgacacugaauacgacaggauucgccgacccaaauacuacgaccggccuucccagcucgacacaugugccuacaaacuuaacggcccccgccaguaccggccccaccgugagcaccgcugacgucaccucuccuaccccugccgggacuacaaguggugcuuccccaguuacucccagcccuagcccuugggacaacggcacugagagcaaagcuccggacaugaccagcaguaccaguccagugacaacuccgacacccaaugcgacguccccaacucccgccgugaccacgccaacaccaaaugccacgucaccuacuccagcggucaccaccccaacgccaaacgcuacuagucccacucuaggcaagacaucucccaccuccgcugucaccaccccuacacccaaugcuaccggucccacggugggugagacuagcccacaggccaacgcaacuaaucauacauuggggggcacaagcccaacccccgucgucacuagccagccuaaaaacgccacaagcgcuguaacuaccggccagcacaauauaacaaguuccaguacuagcaguaugucucugagacccagcucaaauccugaaacccucucccccucuacgucggauaacuccacgucccacaugccucuacucacaagcgcgcacccuaccgggggagaaaauaucacucagguuaccccagcuucuaucucgacucaccaugucucuacuucuuccccagcgccacggcccggcacuaccagccaggcuagcgggccagguaauuccuccacuagcacuaaaccuggcgaagucaacguuaccaagggaacacccccccagaaugcaaccuccccccaagcucccucuggacagaaaacagccgucccuaccgucacaagcaccggugggaaggcgaauucuacgacaggcgggaagcacacuaccggacacggagcaaggacauccacugagcccacgaccgacuacgguggcgacuccaccacccccagacccagguacaaugcgacuaccuaccugcccccuuccacuuccagcaaacugaggccucguuggacuuucacuucucccccagucaccaccgcucaggcuaccgugccugucccgccgaccucucagccccgguuuucaaauuugaguaugcucgugcugcagugggccagccuggcagugcuuacccuccugcucuugcugguuauggcugacugcgccuuccgacguaacuuauccaccagucauacuuacacuacacccccuuaugacgacgcggagaccuacgug

SEQ ID NO: 32 - RNA, 2595 nt, Artificial Sequence
  Synthetic Polynucleotide
auggaagccgccuuacuggucugccaguacacuauucagucccucauccaucucacaggcgaggacccgggguucuucaacgucgaaauccccgaauucccauucuaucccaccuguaacgucugcacagccgacguuaacguuacaaucaauuucgacgugggcgggaaaaaacaccagcuggaccucgacuuugggcagcugacgccccacacuaaagccguuuaccagcccaggggugcauucgguggaucugaaaaugcuacaaaccucuuucugcuugagcugcuuggugcuggagagcuggcccugacaaugcgcagcaaaaaguugccaaucaaugugaccacaggugaagaacagcaggugucccuagaauccguggauguguacuuccaggacguuuucggcacaauguggugccaucacgcagagaugcaaaauccgguguaccuuauccccgaaacagugccguacauuaaaugggauaauuguaacuccacaaacaucacggcaguggugcgcgcucaggggcuggacgugacacucccccuuuccuuaccaacaagugcucaagauuccaacuuuucugugaaaaccgagaugcugggcaacgagauugauauugaaugcaucauggaggauggcgagauuagccagguguugcccggcgacaauaaauuuaauauuaccuguuccggcuaugagucacacgugccaaguggaggcauucucacgagcaccucucccguugcaacacccauuccugggacaggguacgcauauagucucaggcugacaccgagaccgguaucgcgcuucuuagguaacaauuccaucuuguauguguuuuacagcggaaacgggccaaaggccucaggaggagacuacugcauccagagcaauauaguuuuuagcgacgagaucccugccucacaagacaugcccaccaacaccaccgacaucacguacgucggugauaaugccacuuacagcgugccuauggugaccucugaagacgcaaauucacccaaugucacgguuaccgcauucugggcuuggccaaauaacacugaaaccgacuucaaguguaaauggacccuaaccagcggcaccccaucagggugcgagaauaucagcggggccuucgccagcaaccggacauucgacaucaccgugucaggacuagggacugcuccaaaaacauuaauuauuacacggacagcaacuaacgcuacgacuacgacucacaaagugauauuuagcaaagcccccgaaucgacuacuacgagcccgacccuaaacaccaccgguuucgccgaucccaacacaacuacuggucucccaucuucgacccauguuccaacgaaucugacagcuccagcaaguacggggcccacugugaguacagccgacguuacuagcccaacucccgcggguacgacuaguggcgcgucuccagugaccccuucgccuucuccgugggauaauggaaccgagucaaaggcuccugauaugaccagcuccaccagucccguuacaacgccaacccccaaugcaacgaguccaacuccggcgguuaccacuccgacaccaaacgccaccucccccacgccugcaguuacuacgcccaccccuaaugcuacgucacccacucugggaaagaccucaccaaccucugccgugacuacuccuacaccuaaugccacaggacccacaguuggggaaaccagcccacaggcuaacgcaacuaaucauacgcuuggggggaccucucccacgcccguggucacuucacagccuaagaaugccacaagcgcugugacuacaggccagcauaauauaaccagcaguucaaccaguagcaugucccugcguccuucauccaauccugagacucugagccccagcacuagugacaacucaacuucucacaugccguugcugaccuccgcgcaucccacgggcggugagaauaucacacaggugacacccgcgucuauuagcacacaucacgugaguacguccucccccgcaccccgcccaggcacaaccucacaagcaucagguccggggaacagcagcacaaguaccaagccuggcgaagugaauguaaccaagggcacgcccccgcagaacgccacauccccucaagccccauccggccagaagaccgcuguacccaccgugacaucaacuggggggaaagcgaacucaacuaccggggggaagcauacaacagggcacggugccagaacuucuacagagccaaccacggacuacggaggggacagcacaacgcccagaccgcgguacaaugcgaccacauaccugccucccucaacuucgaguaagcugcgacccagauggaccuuuacuucucccccugucaccaccgcucaagccaccgucccgguuccaccuacuucccagccuagauucuccaaucugagcaugcuuguccuacagugggcaucacucgcgguacuaaccuugcugcuacuguuggugauggcggacugcgcguuucgccgcaacuuauccaccucccacacguacacaacaccucccuaugaugacgcugagacuuacguc

SEQ ID NO: 33 - RNA, 669 nt, Artificial Sequence
  Synthetic Polynucleotide
auggugagcuucaagcaggugagagugccccuguucaccgccaucgcccuggugaucgugcugcugcuggccuacuuccugccccccagagugagaggcggcggcagaguggccgccgccgccaucaccugggugcccaagcccaacguggagguguggcccguggaccccccaccccccgugaacuucaacaagaccgccgagcaggaguacggcgacaaggaggugaagcugccccacuggacccccacccugcacaccuuccaggugccccagaacuacaccaaggccaacugcaccuacugcaacaccagagaguacaccuucagcuacaagggcugcugcuucuacuucaccaagaagaagcacaccuggaacggcugcuuccaggccugcgccgagcuguaccccugcaccuacuucuacggccccacccccgacauccugcccguggugaccagaaaccugaacgccaucgagagccugugggugggcguguacagagugggcgagggcaacuggaccagccuggacggcggcaccuucaagguguaccagaucuucggcagccacugcaccuacgugagcaaguucagcaccgugcccgugagccaccacgagugcagcuuccugaagcccugccugugcgugagccagagaagcaacagc

SEQ ID NO: 34 - protein, 223 aa, Artificial Sequence
  Synthetic Polypeptide
MVSFKQVRVPLFTAIALVIVLLLAYFLPPRVRGGGRVAAAAITWVPKPNVEVWPVDPPPPVNFNKTAEQEYGDKEVKLPHWTPTLHTFQVPQNYTKANCTYCNTREYTFSYKGCCFYFTKKKHTWNGCFQACAELYPCTYFYGPTPDILPVVTRNLNAIESLWVGVYRVGEGNWTSLDGGTFKVYQIFGSHCTYVSKFSTVPVSHHECSFLKPCLCVSQRSNS

SEQ ID NO: 35 - RNA, 411 nt, Artificial Sequence
  Synthetic Polynucleotide
augagagccgugggcguguuccuggccaucugccuggugaccaucuucgugcugcccaccuggggcaacugggccuaccccugcugccacgugacccagcugagagcccagcaccugcuggcccuggagaacaucagcgacaucuaccuggugagcaaccagaccugcgacggcuucagccuggccagccugaacagccccaagaacggcagcaaccagcuggugaucagcagaugcgccaacggccugaacguggugagcuucuucaucagcauccugaagagaagcagcagcgcccugaccggccaccugagagagcugcugaccacccuggagacccuguacggcagcuucagcguggaggaccuguucggcgccaaccugaacagauacgccuggcacagaggcggc

SEQ ID NO: 36 - protein, 137 aa, Artificial Sequence
  Synthetic Polypeptide
MRAVGVFLAICLVTIFVLPTWGNWAYPCCHVTQLRAQHLLALENISDIYLVSNQTCDGFSLASLNSPKNGSNQLVISRCANGLNVVSFFISILKRSSSALTGHLRELLTTLETLYGSFSVEDLFGANLNRYAWHRGG

SEQ ID NO: 37 - RNA, 2118 nt, Artificial Sequence
  Synthetic Polynucleotide
augcaguuguugugcguguucugccucguguuacucugggaggugggcgccgccagccuuagcgaggugaagcuccacuuggacaucgagggccacgccagccacuacaccauccccuggaccgagcucauggccaaggugcccggccuuagccccgaggcccuguggcgggaggccaacgugaccgaggaccuggccagcaugcugaaccgguacaagcugaucuacaagaccagcggcacccugggcaucgcccuggccgagcccguggacauccccgccguuagcgaaggcagcaugcagguggacgccagcaaggugcaccccggcgugaucagcggccugaacagccccgccuguauguugagcgccccacuggagaagcagcuguucuacuacaucggcaccaugcugcccaacacccggccccacagcuacguguucuaccagcugcggugccaccugagcuacguugcccugagcaucaacggcgacaaguuccaguacaccggcgccaugaccagcaaguuccugaugggcaccuacaagcgggucaccgagaagggcgacgagcacgugcugucacugguguucggcaagaccaaggaccugcccgaccugcggggccccuucagcuacccuaguuugaccagcgcccagagcggcgacuacagcuuggugaucgugaccaccuucgugcacuacgccaacuuccacaacuacuucgugcccaaccugaaggacauguucagccgggccgugaccaugacugccgcuucuuacgcccgguacgugcugcagaagcugguccugcuggagaugaagggcggcugccgggagcccgagcuggacaccgaaacacugaccaccauguucgaggugagcguggccuucuucaaggugggucacgcggugggcgaaaccggcaacggcugcguggacuuacgcuggcuggccaagagcuucuucgagcugaccgugcugaaggauaucaucggcaucugcuacggcgccaccgugaagggcaugcagagcuacggccuggagcggcuggccgccaugcuuauggcaacagugaagauggaggagcugggacaccugacaacagagaagcaggaguacgcccugagacuggccacagugggcuacccaaaggccggcguguacaguggacugaucggcggcgcaaccagcgugcugcuauccgcuuacaaccggcacccgcuguuccagccccugcacaccgugaugcgggaaacccuguucaucggaagccacgucgugcugcgggagcugaggcugaacguaaccacccagggcccuaaucuggcccuguaucagcuccucaguaccgcccugugcagcgcccuugagaucggcgaggugcucagaggccuggcccucgguaccgagagcggccucuucagcccaugcuacuuaagccugcgguucgaccugacccgggacaaguugcugagcauggccccgcaggaggccacacuggaccaggcagcuguauccaacgccguggacggcuuccugggcagacugucccuggaacgggaggaccgggacgccuggcaccugccugccuacaaguguguggaucggcuggacaaggugcugaugaucaucccucugauuaaugucaccuucaucaucagcagcgaccgggaggugcggggauccgcccucuacgaggccagcaccaccuaucugagcagcagccuguuccugucuccugugaucaugaacaagugcagccagggcgccguggccggcgagccccggcagauccccaagauccagaacuucacccggacccagaagucuugcaucuucugcggcuucgcccuuuuguccuacgacgagaaggagggcuuggagacuacaaccuacaucaccagccaggaggugcagaacagcauccugucaucuaauuacuucgacuucgacaaccugcacguucauuaccugcuccucaccaccaacgguaccgucauggaaaucgccggacuguacgaggagcgggcccauguugugcuggccaucauccuguacuucaucgcuuucgcacuuggcaucuuccuggugcacaagaucgugauguucuuccug

SEQ ID NO: 38 - protein, 706 aa, Artificial Sequence
  Synthetic Polypeptide
MQLLCVFCLVLLWEVGAASLSEVKLHLDIEGHASHYTIPWTELMAKVPGLSPEALWREANVTEDLASMLNRYKLIYKTSGTLGIALAEPVDIPAVSEGSMQVDASKVHPGVISGLNSPACMLSAPLEKQLFYYIGTMLPNTRPHSYVFYQLRCHLSYVALSINGDKFQYTGAMTSKFLMGTYKRVTEKGDEHVLSLVFGKTKDLPDLRGPFSYPSLTSAQSGDYSLVIVTTFVHYANFHNYFVPNLKDMFSRAVTMTAASYARYVLQKLVLLEMKGGCREPELDTETLTTMFEVSVAFFKVGHAVGETGNGCVDLRWLAKSFFELTVLKDIIGICYGATVKGMQSYGLERLAAMLMATVKMEELGHLTTEKQEYALRLATVGYPKAGVYSGLIGGATSVLLSAYNRHPLFQPLHTVMRETLFIGSHVVLRELRLNVTTQGPNLALYQLLSTALCSALEIGEVLRGLALGTESGLFSPCYLSLRFDLTRDKLLSMAPQEATLDQAAVSNAVDGFLGRLSLEREDRDAWHLPAYKCVDRLDKVLMIIPLINVTFIISSDREVRGSALYEASTTYLSSSLFLSPVIMNKCSQGAVAGEPRQIPKIQNFTRTQKSCIFCGFALLSYDEKEGLETTTYITSQEVQNSILSSNYFDFDNLHVHYLLLTTNGTVMEIAGLYEERAHVVLAIILYFIAFALGIFLVHKIVMFFL

SEQ ID NO: 39 - RNA, 1158 nt, Artificial Sequence
  Synthetic Polynucleotide
auggaacacgaccuugagaggggcccaccgggcccgcgacggccaccucgaggaccuccccucuccucuucccuaggccuugcucuccuucuccuccucuuggcgcuacuguuuuggcuguacaucguuaugagugacuggacuggaggagcccuccuuguccucuauuccuuugcucucaugcuuauaauuauaauuuugaucaucuuuaucuucagaagagaccuucucuguccacuuggagcccuuuguauacuccuacugaugaucacccuccugcucaucgcucucuggaauuugcacggacaggcauuguuccuuggaauugugcuguucaucuucgggugcuuacuugucuuagguaucuggaucuacuuauuggagaugcucuggcgacuuggugccaccaucuggcagcuuuuggccuucuuccuagccuucuuccuagaccucauccugcucauuauugcucucuaucuacaacagaacugguggacucuauugguugaucuccuuuggcuccuccuguuucuggcgauuuuaaucuggauguauuaccauggacaacgacacagugaugaacaccaccacgaugacucccucccgcacccucaacaagcuaccgaugauucuggccaugaaucugacucuaacuccaacgagggcagacaccaccugcucgugaguggagccggcgacggaccaccacucugcucucagaaccuaggcgcaccuggaggugguccugacaauggcccacaggacccugacaacacggaugauaauggcccacaggacccugauaacacugaugacaauggcccacaugacccgcugccucaagacccagacaauacugaugacaauggcccacaggacccugacaacacugaugacaauggcccgcacgacccguuaccucauagcccuagcgacucugcuggaaaugauggaggcccuccacaauugacggaagagguugagaacaaaggaggugaccagggcccgccuuugaugacagacggaggcggcggucauagucaugauuccggccauggcggcggugauccacaccuuccuacgcugcuguuggguucuucugguuccgguggagaugaugacgacccgcacggcccaguucagcuaagcuacuaugac

SEQ ID NO: 40 - RNA, 1491 nt, Artificial Sequence
  Synthetic Polynucleotide
auggggucccuagaaauggugccaaugggcgcggguccuccuagccccggcggggauccggauggguacgauggcggaaacaacucccaauauccaucugcuucuggcucuucugggaacacgcccaccccaccgaacgaugaggaacgugaaucuaaugaagagccaccaccgccuuaugaggacccauauuggggcaauggcgaccgucacucggacuaucaaccacuaggaacccaagaucaaagucuguacuugggauugcaacacgacgggaaugacgggcucccuccaccucccuacucuccacgggaugacucaucucaacacauauacgaagaagcgggcagaggaaguaugaauccaguaugccugccuguaauuguugcgcccuaccucuuuuggcuggcggcuauugccgccucguguuucacggccucaguuaguaccguugugaccgccaccggcuuggcccucucacuucuacucuuggcagcaguggccagcucauaugccgcugcacaaaggaaacugcugacaccggugacagugcuuacugcgguugucacuuucuuugcaauuugccuaacauggaggauugaggacccaccuuuuaauucucuucuguuugcauugcuggccgcagcuggcggacuacaaggcauuuacguucuggugaugcuugugcuccugauacuagcguacagaaggagauggcgccguuugacuguuuguggcggcaucauguucuuggcauguguacuuguccucaucgucgacgcuguuuugcagcugaguccccuccuuggagcuguaacugugguuuccaugacgcugcugcuacuggcuuucguccucuggcucucuucgccagguggccuagguacucuuggugcagcccuuuuaacauuggcagcagcucuggcacugcuagcgucacugauuuugggcacacuuaacuugacuacaauguuccuucucaugcuccuauggacacuugugguucuccugauuugcucuucgugcucuucauguccacugagcaagauccuucuggcacgacuguuccuauaugcucucgcacucuuguugcuagccuccgcgcuaaucgcugguggcaguauuuugcaaacaaacuucaagaguuuaagcagcacugaauuuauacccaauuuguucugcauguuauuacugauugucgcuggcauacucuucauucuugcuauccugaccgaauggggcaguggaaauagaacauacgguccagucuuuaugugccucgguggccugcucaccaugguagccggcgcuguguggcugacggugaugucuaacacgcuuuugucugccuggauucuuacagcaggauuccugauuuuccucauuggcuuugcccucuuuggggucauuagaugcugccgcuacugcugcuacuacugccuuacacuggaaagugaggagcgcccaccgaccccauaucgcaacacugua

SEQ ID NO: 41 - RNA, 726 nt, Artificial Sequence
  Synthetic Polynucleotide
augggcagaagacccuucuuucaccccgugggagaagccgacuauuucgaguaccaccaggagggcgguccugacggcgagcccgacgugccuccaggcgccaucgaacagggccccgcugacgauccuggcgaggggccuuccacaggcccucgcggccagggagauggcggaaggcggaagaagggcggcugguuuggcaagcauaggggccagggcggcuccaaucccaaguucgagaauaucgccgaggggcuccgggcucugcuggcccggucgcacgucgaacguaccacugacgaggggacguggguggccggcgucuuuguguacggaggauccaagaccucccuguacaaccugagaaggggcaccgcccuugccaucccucagugcagacucacgccccugagcaggcuccccuuugggauggcuccugggccaggcccgcagcccgggccccucagggaaagcaucguguguuacuuuaugguguuucugcagacacacaucuuugcagaaguucugaaagaugcaaucaaggaucuggugaugaccaagccugcaccuacgugcaauaucagggugacaguaugcuccuucgacgacgguguggaccucccgcccugguucccacccauggucgagggugccgccgccgagggagacgauggcgacgacggugaugaggguggagacggagaugaaggcgaggaggggcaggag

SEQ ID NO: 42 - RNA, 2832 nt, Artificial Sequence
  Synthetic Polynucleotide
auggacaaggacaggcccggcccucccgccuuggacgacaacauggaggaggaggugcccagcaccagcguggugcaggagcaggugagcgccggcgacugggagaacguguuaaucgaguugagcgacagcagcagcgagaaggaggccgaggacgcccaccuggagcccgcccagaagggcaccaagaggaagaggguggaccacgacgcuggcggaucugccccugccaggcccaugcugccaccccagcccgaccugcccggcagggaggccauccugaggagguucccacuggaccugaggacccugcugcaggccaucggcgccgccgccaccaggaucgacaccagggccaucgaccaguucuucggcagccagaucagcaacaccgagauguacaucauguacgccauggccaucagacaagcaauuagggaucgacgcagaaauccugccagcaggagggaccaggccaaguggaggcugcagacccuggccgccggcuggcccaugggcuaccaggccuacagcagcuggauguacagcuacaccgaccaccagaccacuccgaccuucgugcaccuccaggcuacccugggcugcacuggcggucgcaggugccacgugaccuucucagcgggcaccuucaagcugcccaggugcacaccuggcgacaggcaguggcuguacgugcagagcagcgugggcaacauuguucagaguugcaaccccagguacagcaucuucuucgacuacauggcgauucacaggagccugaccaagaucugggaggaaguccugaccccugaccagagggugagcuucauggaguuccugggcuuccugcagaggaccgaccugagcuacaucaagagcuucgugagcgacgcccugggcaccaccagcauccagacuccuuggaucgacgauaacccuagcaccgaaaccgcccaggccuggaacgccgguuuccugaggggcagggccuacggcaucgaccugcuccggaccgagggcgagcacguggagggcgccaccggcgagacuagggaggagagcgaggacacugagagcgacggcgacgacgaggaucugccgugcaucgugagcaggggcggccccaaggugaagaggccucccaucuucauccggaggcuucacaggcugcugcugaugagggccggcaagcguacugaacagggcaaggagguacuggagaaggccaggggcagcacauauggcaccccuagaccgccugugcccaagccgcguccugaagucccgcagagugaugagacagcgacuagccauggcagugcucaggugcccgagccacccaccauccaucucgccgcacagggcauggccuacccacugcacgagcagcacggcauggcgcccugccccguggcccaggcuccuccaaccccgcuuccuccaguauccccuggugaccaguugccaggcguguucagcgacgguaggguggccugcgcgccaguuccugcaccagcaggcccaauugugaggcccugggagcccucccuaacccaggcggcaggucaggccuucgcuccaguuagaccacagcacaugcccguggaaccggugccagugccuacgguggcgcuggagaggcccguguacccaaagccugugcgaccugcgccuccuaagaucgccaugcaaggcccgggcgagacuagcgguaucaggcgggccagggagagguggcgcccggcaccguggacucccaacccaccaaggucaccuagucagaugagcgugcgugauaggcuggcacggcuucgggcagaggcucagguaaagcaggccaguguggaggugcagccaccacagcugacucagguguccccgcagcagcccauggagggcccacuggugccggaacagcagauguuccccggcgccccguucagccagguggccgacgugguuagggcuccuggcgugccugcuaugcagccucaguacuucgaccuaccgcugauccagcccaucagucaaggugccccaguggccccacugagggcuagcaugggcccggucccuccuguuccagccacccagccucaauauuucgacauuccucugaccgagccuauaaaccagggcgcgucugcggcccacuuccugccucaacagccaauggaaggcccgcuggucccagaacaguggauguucccuggagcugcccugagccaaucagugaggccgggaguugcccagagccaguauuucgaucucccuuugacacagccuaucaaucacggagcaccugccgcucacuuccuucaccagccuccgauggaagguccuuggguuccagagcaauggauguuccaaggugcgccaccaucucagggcacagacgugguccagcaucagcuggacgcgcuuggcuacacucuacacggccugaaccacccgggcguuccagugaguccagccgugaaccaguaccaucucucucaggcugccuucggccugcccauugacgaggacgagagcggcgagggcagcgauaccagcgagcccugcgaagcccuggaucuuuccauccacggccgaccuugcccacaggcuccagaguggcccguacaggaagaaggcggccaggacgccaccgagguccuggacuuguccauacauggcagaccgcgcccuaggaccccggaguggccaguucagggugaagguggucagaacgugaccggcccggaaacccgaaggguggucguguccgcuguuguccacaugugucaggaugacgaauucccagaucugcaagauccacccgacgaggcc

SEQ ID NO: 43 - protein, 944 aa, Artificial Sequence
  Synthetic Polypeptide
MDKDRPGPPALDDNMEEEVPSTSVVQEQVSAGDWENVLIELSDSSSEKEAEDAHLEPAQKGTKRKRVDHDAGGSAPARPMLPPQPDLPGREAILRRFPLDLRTLLQAIGAAATRIDTRAIDQFFGSQISNTEMYIMYAMAIRQAIRDRRRNPASRRDQAKWRLQTLAAGWPMGYQAYSSWMYSYTDHQTTPTFVHLQATLGCTGGRRCHVTFSAGTFKLPRCTPGDRQWLYVQSSVGNIVQSCNPRYSIFFDYMAIHRSLTKIWEEVLTPDQRVSFMEFLGFLQRTDLSYIKSFVSDALGTTSIQTPWIDDNPSTETAQAWNAGFLRGRAYGIDLLRTEGEHVEGATGETREESEDTESDGDDEDLPCIVSRGGPKVKRPPIFIRRLHRLLLMRAGKRTEQGKEVLEKARGSTYGTPRPPVPKPRPEVPQSDETATSHGSAQVPEPPTIHLAAQGMAYPLHEQHGMAPCPVAQAPPTPLPPVSPGDQLPGVFSDGRVACAPVPAPAGPIVRPWEPSLTQAAGQAFAPVRPQHMPVEPVPVPTVALERPVYPKPVRPAPPKIAMQGPGETSGIRRARERWRPAPWTPNPPRSPSQMSVRDRLARLRAEAQVKQASVEVQPPQLTQVSPQQPMEGPLVPEQQMFPGAPFSQVADVVRAPGVPAMQPQYFDLPLIQPISQGAPVAPLRASMGPVPPVPATQPQYFDIPLTEPINQGASAAHFLPQQPMEGPLVPEQWMFPGAALSQSVRPGVAQSQYFDLPLTQPINHGAPAAHFLHQPPMEGPWVPEQWMFQGAPPSQGTDVVQHQLDALGYTLHGLNHPGVPVSPAVNQYHLSQAAFGLPIDEDESGEGSDTSEPCEALDLSIHGRPCPQAPEWPVQEEGGQDATEVLDLSIHGRPRPRTPEWPVQGEGGQNVTGPETRRVVVSAVVHMCQDDEFPDLQDPPDEA

SEQ ID NO: 44 - RNA, 2595 nt, Artificial Sequence
  Synthetic Polynucleotide
auggaggcagcacugcuggucugccaguauacaauccagucgcucauucaucugacaggcgaggaccccggcuucuuuaacguggaaaucccagaguucccuuucuauccaaccuguaacguuugcacuuacgacgugaacgugacaaucaauuucgacgugggaggaaagaagcaucagcuugaucuggauuucggccaacugacgccacacaccaaagcgguguaccaaccaaggggugcauuuggagggagcgagaaugcuacaaaucuguucuuacuggaacugcuuggugcaggagagcuggcacuaaccaugcgaagcaagaagcuccccaucaacguuaccaccggggaagaacagcaagucagccuugaauccguggauguguacuuucaggauguuuucggcaccauguggugucaccacgcugagaugcagaaucccguguaucucauacccgagacuguacccuacaucaagugggauaauugcaauucaacuaauauuacggcuguggugagggcccagggcuuggacgugacucugcccuuaucucuaccuacuucugcccaagacuccaauuucucugucaagaccgagaugcucgggaaugagaucgauaucgagugcaucauggaggacggugagauaagccagguucugcccggcgacaacaaguucaauaucacuuguucuggcuacgagucccaugugccuagugguggcauacucacaaguacuucucccguagccacgcccauucccggaaccggauacgccuacagucugcgucugaccccacggccuguguccagauuccuggguaacaauaguaucuuauacguguuuuauagcggaaacggcccuaaagcguccggaggggacuauuguauucagaguaauaucguuuucucugaugagauuccugccagucaggacaugccgacaaacacaacugauauuaccuacgugggcgacaaugccacguauucagugcccauggucacgagcgaggacgccaauucaccaaauguuacuguaacagcuuucugggccuggccaaauaacacugagacugacuucaaauguaaguggacuuugaccucuggaacuccgucggguugcgagaauaucagcggggccuuugcuuccaacaggacuuucgacaucacugucucagggcuggggacagcaccgaagacauuaaucauaacacggaccgccaccaacgccacgacuacaacccauaaggugaucuuuuccaaggcaccugaguccaccacuaccuccccgacucuuaacacuacgggcuucgcugaucccaacaccacuacgggguugccuagcucgacacaugugccgacgaaccugacugccccugcaucgaccgggcccacaguuucgaccgccgaugugacaucaccaacgcccgcagguacaaccucaggcgccagcccagugaccccuuccccaagccccugggauaauggaacggaguccaaggcuccugauaugacuuccucuaccagccccgugacuacacccacucccaacgcaacuagcccaaccccagcugugacgacgcccaccccgaacgcgacaucucccacaccugcugugacaaccccaaccccuaacgccacuagcccuacccuagguaagaccaguccgacuagcgccguuacaaccccuaccccuaacgcaaccggcccgaccgugggcgagacuuccccgcaagccaaugcgacaaaucacacauugggcgggaccucuccuacaccagucguuacaucucagccuaagaacgcuaccuccgcugucacuaccggacagcacaacaucaccagcucaagcacgaguuccaugagcuugcggccgagcucaaaucccgagacccuaucaccauccacaucagacaacaguacuucacacaugccacucuugacgagcgcucaccccaccggcggcgagaacaucacccaggugacuccggcgucuauuuccacccaccacgucagcacgucgucucccgcaccgagaccagggacgacuucucaggccagugggccuggcaacuccucuacaagcacaaagccaggcgaaguuaacgugacaaagggaacgccuccccagaacgcaaccaguccucaggcgcccagcgggcagaagacugcggugccaacugugaccagcaccgguggcaaggccaacucaacaacuggaggcaagcauacgacggggcacggcgcccggaccuccacugaacccacgaccgauuacggaggugacagcacaacaccgcggccacgauauaaugccaccacuuaucugccaccauccacaagcuccaagcugcggccacgguggaccuucacaagcccacccgugacgacugcccaagcgacggugccagugccaccuacaagccagccacgcuucuccaaccuuaguaugcucguucuccagugggccagccuugcuguucugacccuccuccugcugcucgugauggccgauugcgccuuuaggagaaaccucagcacuagccacacguacaccacgccgcccuacgaugacgccgagacuuacguc

SEQ ID NO: 45 - protein, 865 aa, Artificial Sequence
  Synthetic Polypeptide
MEAALLVCQYTIQSLIHLTGEDPGFFNVEIPEFPFYPTCNVCTYDVNVTINFDVGGKKHQLDLDFGQLTPHTKAVYQPRGAFGGSENATNLFLLELLGAGELALTMRSKKLPINVTTGEEQQVSLESVDVYFQDVFGTMWCHHAEMQNPVYLIPETVPYIKWDNCNSTNITAVVRAQGLDVTLPLSLPTSAQDSNFSVKTEMLGNEIDIECIMEDGEISQVLPGDNKFNITCSGYESHVPSGGILTSTSPVATPIPGTGYAYSLRLTPRPVSRFLGNNSILYVFYSGNGPKASGGDYCIQSNIVFSDEIPASQDMPTNTTDITYVGDNATYSVPMVTSEDANSPNVTVTAFWAWPNNTETDFKCKWTLTSGTPSGCENISGAFASNRTFDITVSGLGTAPKTLIITRTATNATTTTHKVIFSKAPESTTTSPTLNTTGFADPNTTTGLPSSTHVPTNLTAPASTGPTVSTADVTSPTPAGTTSGASPVTPSPSPWDNGTESKAPDMTSSTSPVTTPTPNATSPTPAVTTPTPNATSPTPAVTTPTPNATSPTLGKTSPTSAVTTPTPNATGPTVGETSPQANATNHTLGGTSPTPVVTSQPKNATSAVTTGQHNITSSSTSSMSLRPSSNPETLSPSTSDNSTSHMPLLTSAHPTGGENITQVTPASISTHHVSTSSPAPRPGTTSQASGPGNSSTSTKPGEVNVTKGTPPQNATSPQAPSGQKTAVPTVTSTGGKANSTTGGKHTTGHGARTSTEPTTDYGGDSTTPRPRYNATTYLPPSTSSKLRPRWTFTSPPVTTAQATVPVPPTSQPRFSNLSMLVLQWASLAVLTLLLLLVMADCAFRRNLSTSHTYTTPPYDDAETYV

SEQ ID NO: 46 - RNA, 2595 nt, Artificial Sequence
  Synthetic Polynucleotide
auggaggcagcacugcuggucugccaguauacaauccagucgcucauucaucugacaggcgaggaccccggcuucuuuaacguggaaaucccagaguucccuuucuauccaaccuguaacguuugcacugcugacgugaacgugacauucaauuucgacgugggaggaaagaagcaucagcuugaucuggauuucggccaacugacgccacacaccaaagcgguguaccaaccaaggggugcauuuggagggagcgagaaugcuacaaaucuguucuuacuggaacugcuuggugcaggagagcuggcacuaaccaugcgaagcaagaagcuccccaucaacguuaccaccggggaagaacagcaagucagccuugaauccguggauguguacuuucaggauguuuucggcaccauguggugucaccacgcugagaugcagaaucccguguaucucauacccgagacuguacccuacaucaagugggauaauugcaauucaacuaauauuacggcuguggugagggcccagggcuuggacgugacucugcccuuaucucuaccuacuucugcccaagacuccaauuucucugucaagaccgagaugcucgggaaugagaucgauaucgagugcaucauggaggacggugagauaagccagguucugcccggcgacaacaaguucaauaucacuuguucuggcuacgagucccaugugccuagugguggcauacucacaaguacuucucccguagccacgcccauucccggaaccggauacgccuacagucugcgucugaccccacggccuguguccagauuccuggguaacaauaguaucuuauacguguuuuauagcggaaacggcccuaaagcguccggaggggacuauuguauucagaguaauaucguuuucucugaugagauuccugccagucaggacaugccgacaaacacaacugauauuaccuacgugggcgacaaugccacguauucagugcccauggucacgagcgaggacgccaauucaccaaauguuacuguaacagcuuucugggccuggccaaauaacacugagacugacuucaaauguaaguggacuuugaccucuggaacuccgucggguugcgagaauaucagcggggccuuugcuuccaacaggacuuucgacaucacugucucagggcuggggacagcaccgaagacauuaaucauaacacggaccgccaccaacgccacgacuacaacccauaaggugaucuuuuccaaggcaccugaguccaccacuaccuccccgacucuuaacacuacgggcuucgcugaucccaacaccacuacgggguugccuagcucgacacaugugccgacgaaccugacugccccugcaucgaccgggcccacaguuucgaccgccgaugugacaucaccaacgcccgcagguacaaccucaggcgccagcccagugaccccuuccccaagccccugggauaauggaacggaguccaaggcuccugauaugacuuccucuaccagccccgugacuacacccacucccaacgcaacuagcccaaccccagcugugacgacgcccaccccgaacgcgacaucucccacaccugcugugacaaccccaaccccuaacgccacuagcccuacccuagguaagaccaguccgacuagcgccguuacaaccccuaccccuaacgcaaccggcccgaccgugggcgagacuuccccgcaagccaaugcgacaaaucacacauugggcgggaccucuccuacaccagucguuacaucucagccuaagaacgcuaccuccgcugucacuaccggacagcacaacaucaccagcucaagcacgaguuccaugagcuugcggccgagcucaaaucccgagacccuaucaccauccacaucagacaacaguacuucacacaugccacucuugacgagcgcucaccccaccggcggcgagaacaucacccaggugacuccggcgucuauuuccacccaccacgucagcacgucgucucccgcaccgagaccagggacgacuucucaggccagugggccuggcaacuccucuacaagcacaaagccaggcgaaguuaacgugacaaagggaacgccuccccagaacgcaaccaguccucaggcgcccagcgggcagaagacugcggugccaacugugaccagcaccgguggcaaggccaacucaacaacuggaggcaagcauacgacggggcacggcgcccggaccuccacugaacccacgaccgauuacggaggugacagcacaacaccgcggccacgauauaaugccaccacuuaucugccaccauccacaagcuccaagcugcggccacgguggaccuucacaagcccacccgugacgacugcccaagcgacggugccagugccaccuacaagccagccacgcuucuccaaccuuaguaugcucguucuccagugggccagccuugcuguucugacccuccuccugcugcucgugauggccgauugcgccuuuaggagaaaccucagcacuagccacacguacaccacgccgcccuacgaugacgccgagacuuacguc

SEQ ID NO: 47 - protein, 865 aa, Artificial Sequence
  Synthetic Polypeptide
MEAALLVCQYTIQSLIHLTGEDPGFFNVEIPEFPFYPTCNVCTADVNVTFNFDVGGKKHQLDLDFGQLTPHTKAVYQPRGAFGGSENATNLFLLELLGAGELALTMRSKKLPINVTTGEEQQVSLESVDVYFQDVFGTMWCHHAEMQNPVYLIPETVPYIKWDNCNSTNITAVVRAQGLDVTLPLSLPTSAQDSNFSVKTEMLGNEIDIECIMEDGEISQVLPGDNKFNITCSGYESHVPSGGILTSTSPVATPIPGTGYAYSLRLTPRPVSRFLGNNSILYVFYSGNGPKASGGDYCIQSNIVFSDEIPASQDMPTNTTDITYVGDNATYSVPMVTSEDANSPNVTVTAFWAWPNNTETDFKCKWTLTSGTPSGCENISGAFASNRTFDITVSGLGTAPKTLIITRTATNATTTTHKVIFSKAPESTTTSPTLNTTGFADPNTTTGLPSSTHVPTNLTAPASTGPTVSTADVTSPTPAGTTSGASPVTPSPSPWDNGTESKAPDMTSSTSPVTTPTPNATSPTPAVTTPTPNATSPTPAVTTPTPNATSPTLGKTSPTSAVTTPTPNATGPTVGETSPQANATNHTLGGTSPTPVVTSQPKNATSAVTTGQHNITSSSTSSMSLRPSSNPETLSPSTSDNSTSHMPLLTSAHPTGGENITQVTPASISTHHVSTSSPAPRPGTTSQASGPGNSSTSTKPGEVNVTKGTPPQNATSPQAPSGQKTAVPTVTSTGGKANSTTGGKHTTGHGARTSTEPTTDYGGDSTTPRPRYNATTYLPPSTSSKLRPRWTFTSPPVTTAQATVPVPPTSQPRFSNLSMLVLQWASLAVLTLLLLLVMADCAFRRNLSTSHTYTTPPYDDAETYV

SEQ ID NO: 48 - RNA, 2595 nt, Artificial Sequence
  Synthetic Polynucleotide
auggaggcagcacugcuggucugccaguauacaauccagucgcucauucaucugacaggcgaggaccccggcuucuuuaacguggaaaucccagaguucccuuucuauccaaccuguaacguuugcacugcugacgugaacgugacaaucaauuucgacgugggaggaaagaagcaucagcuugaucuggauuucggccaacugacgccacacaccaaagcgguguaccaaccaaggggugcauuuggagggagcgagaaugcuacaaaucuguucuuacuggaacugcuuggugcaggagagcuggcacuaaccaugcgaagcaagaagcuccccaucaacguuaccaccggggaagaacagcaagucagccuugaauccguggauguguacuuucaggauguuuucggcaccauguggugucaccacgcugagaugcagaaucccguguaucucauacccgagacuguacccuacaucaagugggauaauugcaauucaacuaauauuacggcuguggugagggcccagggcuuggacgugacucugcccuuaucucuaccuacuucugcccaagacuccaauuucucugucaagaccgagauacucgggaaugagaucgauaucgagugcaucauggaggacggugagauaagccagguucugcccggcgacaacaaguucaauaucacuuguucuggcuacgagucccaugugccuagugguggcauacucacaaguacuucucccguagccacgcccauucccggaaccggauacgccuacagucugcgucugaccccacggccuguguccagauuccuggguaacaauaguaucuuauacguguuuuauagcggaaacggcccuaaagcguccggaggggacuauuguauucagaguaauaucguuuucucugaugagauuccugccagucaggacaugccgacaaacacaacugauauuaccuacgugggcgacaaugccacguauucagugcccauggucacgagcgaggacgccaauucaccaaauguuacuguaacagcuuucugggccuggccaaauaacacugagacugacuucaaauguaaguggacuuugaccucuggaacuccgucggguugcgagaauaucagcggggccuuugcuuccaacaggacuuucgacaucacugucucagggcuggggacagcaccgaagacauuaaucauaacacggaccgccaccaacgccacgacuacaacccauaaggugaucuuuuccaaggcaccugaguccaccacuaccuccccgacucuuaacacuacgggcuucgcugaucccaacaccacuacgggguugccuagcucgacacaugugccgacgaaccugacugccccugcaucgaccgggcccacaguuucgaccgccgaugugacaucaccaacgcccgcagguacaaccucaggcgccagcccagugaccccuuccccaagccccugggauaauggaacggaguccaaggcuccugauaugacuuccucuaccagccccgugacuacacccacucccaacgcaacuagcccaaccccagcugugacgacgcccaccccgaacgcgacaucucccacaccugcugugacaaccccaaccccuaacgccacuagcccuacccuagguaagaccaguccgacuagcgccguuacaaccccuaccccuaacgcaaccggcccgaccgugggcgagacuuccccgcaagccaaugcgacaaaucacacauugggcgggaccucuccuacaccagucguuacaucucagccuaagaacgcuaccuccgcugucacuaccggacagcacaacaucaccagcucaagcacgaguuccaugagcuugcggccgagcucaaaucccgagacccuaucaccauccacaucagacaacaguacuucacacaugccacucuugacgagcgcucaccccaccggcggcgagaacaucacccaggugacuccggcgucuauuuccacccaccacgucagcacgucgucucccgcaccgagaccagggacgacuucucaggccagugggccuggcaacuccucuacaagcacaaagccaggcgaaguuaacgugacaaagggaacgccuccccagaacgcaaccaguccucaggcgcccagcgggcagaagacugcggugccaacugugaccagcaccgguggcaaggccaacucaacaacuggaggcaagcauacgacggggcacggcgcccggaccuccacugaacccacgaccgauuacggaggugacagcacaacaccgcggccacgauauaaugccaccacuuaucugccaccauccacaagcuccaagcugcggccacgguggaccuucacaagcccacccgugacgacugcccaagcgacggugccagugccaccuacaagccagccacgcuucuccaaccuuaguaugcucguucuccagugggccagccuugcuguucugacccuccuccugcugcucgugauggccgauugcgccuuuaggagaaaccucagcacuagccacacguacaccacgccgcccuacgaugacgccgagacuuacguc

SEQ ID NO: 49 - protein, 865 aa, Artificial Sequence
  Synthetic Polypeptide
MEAALLVCQYTIQSLIHLTGEDPGFFNVEIPEFPFYPTCNVCTADVNVTINFDVGGKKHQLDLDFGQLTPHTKAVYQPRGAFGGSENATNLFLLELLGAGELALTMRSKKLPINVTTGEEQQVSLESVDVYFQDVFGTMWCHHAEMQNPVYLIPETVPYIKWDNCNSTNITAVVRAQGLDVTLPLSLPTSAQDSNFSVKTEILGNEIDIECIMEDGEISQVLPGDNKFNITCSGYESHVPSGGILTSTSPVATPIPGTGYAYSLRLTPRPVSRFLGNNSILYVFYSGNGPKASGGDYCIQSNIVFSDEIPASQDMPTNTTDITYVGDNATYSVPMVTSEDANSPNVTVTAFWAWPNNTETDFKCKWTLTSGTPSGCENISGAFASNRTFDITVSGLGTAPKTLIITRTATNATTTTHKVIFSKAPESTTTSPTLNTTGFADPNTTTGLPSSTHVPTNLTAPASTGPTVSTADVTSPTPAGTTSGASPVTPSPSPWDNGTESKAPDMTSSTSPVTTPTPNATSPTPAVTTPTPNATSPTPAVTTPTPNATSPTLGKTSPTSAVTTPTPNATGPTVGETSPQANATNHTLGGTSPTPVVTSQPKNATSAVTTGQHNITSSSTSSMSLRPSSNPETLSPSTSDNSTSHMPLLTSAHPTGGENITQVTPASISTHHVSTSSPAPRPGTTSQASGPGNSSTSTKPGEVNVTKGTPPQNATSPQAPSGQKTAVPTVTSTGGKANSTTGGKHTTGHGARTSTEPTTDYGGDSTTPRPRYNATTYLPPSTSSKLRPRWTFTSPPVTTAQATVPVPPTSQPRFSNLSMLVLQWASLAVLTLLLLLVMADCAFRRNLSTSHTYTTPPYDDAETYV

SEQ ID NO: 50 - RNA, 2595 nt, Artificial Sequence
  Synthetic Polynucleotide
auggaggcagcacugcuggucugccaguauacaauccagucgcucauucaucugacaggcgaggaccccggcuucuuuaacguggaaaucccagaguucccuuucuauccaaccuguaacguuugcacugcugacgugaacgugacaaucaauuucgacgugggaggaaagaagcaucagcuugaucuggauuucggccaacugacgccacacaccaaagcgguguaccaaccaaggggugcauuuggagggagcgagaaugcuacaaaucuguucuuacuggaacugcuuggugcaggagagcuggcacuaaccaugcgaagcaagaagcuccccaucaacguuaccaccggggaagaacagcaagucagccuugaauccguggauguguacuuucaggauguuuucggcaccauguggugucaccacgcugagaugcagaaucccguguaucucauacccgagacuguacccuacaucaagugggauaauugcaauucaacuaauauuacggcuguggugagggcccagggcuuggacgugacucugcccuuaucucuaccuacuucugcccaagacuccaauuucucugucaagaccgagaugcucgggaaugagaucgauaucgagugcaucauggaggacggugagauaagccagguucugcccggcgacaacaaguucaauaucacuuguucuggcuacgagucccaugugccuagugguggcauacucacaaguacuucucccguagccacgcccauucccggaaccggauacgccuacagucugcgucugaccccacggccuguguccagauuccuggguaacaauaguaucuuauacguguuuuauagcggaaacggcccuaaagcguccggaggggacuauuguauucagaguaauaucguuuucucugaugagauuccugccagucaggacaugccgacaaacacaacugauauuaccuacgugggcgacaaugccacguauucagugcccauggucacgagcgaggacgccaauucaccaaauguuacuguaacagcuuucugggccuggccaaauaacacugagacugacuucaaauguaaguggacuuugaccucuggaacuccgucggguugcgagaauaucagcggggccuuugcuuccaacaggacuuucgacaucacugucucagggcuggggacagcaccgaagacauuaaucauaacacggaccgccaccaacgccacgacuacaaccuggaaggugaucuuuuccaaggcaccugaguccaccacuaccuccccgacucuuaacacuacgggcuucgcugaucccaacaccacuacgggguugccuagcucgacacaugugccgacgaaccugacugccccugcaucgaccgggcccacaguuucgaccgccgaugugacaucaccaacgcccgcagguacaaccucaggcgccagcccagugaccccuuccccaagccccugggauaauggaacggaguccaaggcuccugauaugacuuccucuaccagccccgugacuacacccacucccaacgcaacuagcccaaccccagcugugacgacgcccaccccgaacgcgacaucucccacaccugcugugacaaccccaaccccuaacgccacuagcccuacccuagguaagaccaguccgacuagcgccguuacaaccccuaccccuaacgcaaccggcccgaccgugggcgagacuuccccgcaagccaaugcgacaaaucacacauugggcgggaccucuccuacaccagucguuacaucucagccuaagaacgcuaccuccgcugucacuaccggacagcacaacaucaccagcucaagcacgaguuccaugagcuugcggccgagcucaaaucccgagacccuaucaccauccacaucagacaacaguacuucacacaugccacucuugacgagcgcucaccccaccggcggcgagaacaucacccaggugacuccggcgucuauuuccacccaccacgucagcacgucgucucccgcaccgagaccagggacgacuucucaggccagugggccuggcaacuccucuacaagcacaaagccaggcgaaguuaacgugacaaagggaacgccuccccagaacgcaaccaguccucaggcgcccagcgggcagaagacugcggugccaacugugaccagcaccgguggcaaggccaacucaacaacuggaggcaagcauacgacggggcacggcgcccggaccuccacugaacccacgaccgauuacggaggugacagcacaacaccgcggccacgauauaaugccaccacuuaucugccaccauccacaagcuccaagcugcggccacgguggaccuucacaagcccacccgugacgacugcccaagcgacggugccagugccaccuacaagccagccacgcuucuccaaccuuaguaugcucguucuccagugggccagccuugcuguucugacccuccuccugcugcucgugauggccgauugcgccuuuaggagaaaccucagcacuagccacacguacaccacgccgcccuacgaugacgccgagacuuacguc

SEQ ID NO: 51 - protein, 865 aa, Artificial Sequence
  Synthetic Polypeptide
MEAALLVCQYTIQSLIHLTGEDPGFFNVEIPEFPFYPTCNVCTADVNVTINFDVGGKKHQLDLDFGQLTPHTKAVYQPRGAFGGSENATNLFLLELLGAGELALTMRSKKLPINVTTGEEQQVSLESVDVYFQDVFGTMWCHHAEMQNPVYLIPETVPYIKWDNCNSTNITAVVRAQGLDVTLPLSLPTSAQDSNFSVKTEMLGNEIDIECIMEDGEISQVLPGDNKFNITCSGYESHVPSGGILTSTSPVATPIPGTGYAYSLRLTPRPVSRFLGNNSILYVFYSGNGPKASGGDYCIQSNIVFSDEIPASQDMPTNTTDITYVGDNATYSVPMVTSEDANSPNVTVTAFWAWPNNTETDFKCKWTLTSGTPSGCENISGAFASNRTFDITVSGLGTAPKTLIITRTATNATTTTWKVIFSKAPESTTTSPTLNTTGFADPNTTTGLPSSTHVPTNLTAPASTGPTVSTADVTSPTPAGTTSGASPVTPSPSPWDNGTESKAPDMTSSTSPVTTPTPNATSPTPAVTTPTPNATSPTPAVTTPTPNATSPTLGKTSPTSAVTTPTPNATGPTVGETSPQANATNHTLGGTSPTPVVTSQPKNATSAVTTGQHNITSSSTSSMSLRPSSNPETLSPSTSDNSTSHMPLLTSAHPTGGENITQVTPASISTHHVSTSSPAPRPGTTSQASGPGNSSTSTKPGEVNVTKGTPPQNATSPQAPSGQKTAVPTVTSTGGKANSTTGGKHTTGHGARTSTEPTTDYGGDSTTPRPRYNATTYLPPSTSSKLRPRWTFTSPPVTTAQATVPVPPTSQPRFSNLSMLVLQWASLAVLTLLLLLVMADCAFRRNLSTSHTYTTPPYDDAETYV

SEQ ID NO: 52 - RNA, 2595 nt, Artificial Sequence
  Synthetic Polynucleotide
auggaggcagcacugcuggucugccaguauacaauccagucgcucauucaucugacaggcgaggaccccggcuucuuuaacguggaaaucccagaguucccuuucuauccaaccuguaacguuugcacuuacgacgugaacgugacauucaauuucgacgugggaggaaagaagcaucagcuugaucuggauuucggccaacugacgccacacaccaaagcgguguaccaaccaaggggugcauuuggagggagcgagaaugcuacaaaucuguucuuacuggaacugcuuggugcaggagagcuggcacuaaccaugcgaagcaagaagcuccccaucaacguuaccaccggggaagaacagcaagucagccuugaauccguggauguguacuuucaggauguuuucggcaccauguggugucaccacgcugagaugcagaaucccguguaucucauacccgagacuguacccuacaucaagugggauaauugcaauucaacuaauauuacggcuguggugagggcccagggcuuggacgugacucugcccuuaucucuaccuacuucugcccaagacuccaauuucucugucaagaccgagauacucgggaaugagaucgauaucgagugcaucauggaggacggugagauaagccagguucugcccggcgacaacaaguucaauaucacuuguucuggcuacgagucccaugugccuagugguggcauacucacaaguacuucucccguagccacgcccauucccggaaccggauacgccuacagucugcgucugaccccacggccuguguccagauuccuggguaacaauaguaucuuauacguguuuuauagcggaaacggcccuaaagcguccggaggggacuauuguauucagaguaauaucguuuucucugaugagauuccugccagucaggacaugccgacaaacacaacugauauuaccuacgugggcgacaaugccacguauucagugcccauggucacgagcgaggacgccaauucaccaaauguuacuguaacagcuuucugggccuggccaaauaacacugagacugacuucaaauguaaguggacuuugaccucuggaacuccgucggguugcgagaauaucagcggggccuuugcuuccaacaggacuuucgacaucacugucucagggcuggggacagcaccgaagacauuaaucauaacacggaccgccaccaacgccacgacuacaaccuggaaggugaucuuuuccaaggcaccugaguccaccacuaccuccccgacucuuaacacuacgggcuucgcugaucccaacaccacuacgggguugccuagcucgacacaugugccgacgaaccugacugccccugcaucgaccgggcccacaguuucgaccgccgaugugacaucaccaacgcccgcagguacaaccucaggcgccagcccagugaccccuuccccaagccccugggauaauggaacggaguccaaggcuccugauaugacuuccucuaccagccccgugacuacacccacucccaacgcaacuagcccaaccccagcugugacgacgcccaccccgaacgcgacaucucccacaccugcugugacaaccccaaccccuaacgccacuagcccuacccuagguaagaccaguccgacuagcgccguuacaaccccuaccccuaacgcaaccggcccgaccgugggcgagacuuccccgcaagccaaugcgacaaaucacacauugggcgggaccucuccuacaccagucguuacaucucagccuaagaacgcuaccuccgcugucacuaccggacagcacaacaucaccagcucaagcacgaguuccaugagcuugcggccgagcucaaaucccgagacccuaucaccauccacaucagacaacaguacuucacacaugccacucuugacgagcgcucaccccaccggcggcgagaacaucacccaggugacuccggcgucuauuuccacccaccacgucagcacgucgucucccgcaccgagaccagggacgacuucucaggccagugggccuggcaacuccucuacaagcacaaagccaggcgaaguuaacgugacaaagggaacgccuccccagaacgcaaccaguccucaggcgcccagcgggcagaagacugcggugccaacugugaccagcaccgguggcaaggccaacucaacaacuggaggcaagcauacgacggggcacggcgcccggaccuccacugaacccacgaccgauuacggaggugacagcacaacaccgcggccacgauauaaugccaccacuuaucugccaccauccacaagcuccaagcugcggccacgguggaccuucacaagcccacccgugacgacugcccaagcgacggugccagugccaccuacaagccagccacgcuucuccaaccuuaguaugcucguucuccagugggccagccuugcuguucugacccuccuccugcugcucgugauggccgauugcgccuuuaggagaaaccucagcacuagccacacguacaccacgccgcccuacgaugacgccgagacuuacguc

SEQ ID NO: 53 - protein, 865 aa, Artificial Sequence
  Synthetic Polypeptide
MEAALLVCQYTIQSLIHLTGEDPGFFNVEIPEFPFYPTCNVCTYDVNVTFNFDVGGKKHQLDLDFGQLTPHTKAVYQPRGAFGGSENATNLFLLELLGAGELALTMRSKKLPINVTTGEEQQVSLESVDVYFQDVFGTMWCHHAEMQNPVYLIPETVPYIKWDNCNSTNITAVVRAQGLDVTLPLSLPTSAQDSNFSVKTEILGNEIDIECIMEDGEISQVLPGDNKFNITCSGYESHVPSGGILTSTSPVATPIPGTGYAYSLRLTPRPVSRFLGNNSILYVFYSGNGPKASGGDYCIQSNIVFSDEIPASQDMPTNTTDITYVGDNATYSVPMVTSEDANSPNVTVTAFWAWPNNTETDFKCKWTLTSGTPSGCENISGAFASNRTFDITVSGLGTAPKTLIITRTATNATTTTWKVIFSKAPESTTTSPTLNTTGFADPNTTTGLPSSTHVPTNLTAPASTGPTVSTADVTSPTPAGTTSGASPVTPSPSPWDNGTESKAPDMTSSTSPVTTPTPNATSPTPAVTTPTPNATSPTPAVTTPTPNATSPTLGKTSPTSAVTTPTPNATGPTVGETSPQANATNHTLGGTSPTPVVTSQPKNATSAVTTGQHNITSSSTSSMSLRPSSNPETLSPSTSDNSTSHMPLLTSAHPTGGENITQVTPASISTHHVSTSSPAPRPGTTSQASGPGNSSTSTKPGEVNVTKGTPPQNATSPQAPSGQKTAVPTVTSTGGKANSTTGGKHTTGHGARTSTEPTTDYGGDSTTPRPRYNATTYLPPSTSSKLRPRWTFTSPPVTTAQATVPVPPTSQPRFSNLSMLVLQWASLAVLTLLLLLVMADCAFRRNLSTSHTYTTPPYDDAETYV

SEQ ID NO: 54 - RNA, 2595 nt, Artificial Sequence
  Synthetic Polynucleotide
auggaggcagcacugcuggucugccaguauacaauccagucgcucauucaucugacaggcgaggaccccggcuucuuuaacguggaaaucccagaguucccuuucuauccaaccuguaacguuugcacuuacgacgugaacgugacauucaauuucgacgugggaggaaagaagcaucagcuugaucuggauuucggccaacugacgccacacaccaaagcgguguaccaaccaaggggugcauuuggagggagcgagaaugcugcgaaucuguucuuacuggaacugcuuggugcaggagagcuggcacuaaccaugcgaagcaagaagcuccccaucaacguuaccaccggggaagaacagcaagucagccuugaauccguggauguguacuuucaggauguuuucggcaccauguggugucaccacgcugagaugcagaaucccguguaucucauacccgagacuguacccuacaucaagugggauaauugcaauucagcgaauauuacggcuguggugagggcccagggcuuggacgugacucugcccuuaucucuaccuacuucugcccaagacuccaauuucgcggucaagaccgagauacucgggaaugagaucgauaucgagugcaucauggaggacggugagauaagccagguucugcccggcgacaacaaguucaauaucgcguguucuggcuacgagucccaugugccuagugguggcauacucacaaguacuucucccguagccacgcccauucccggaaccggauacgccuacagucugcgucugaccccacggccuguguccagauuccuggguaacaauaguaucuuauacguguuuuauagcggaaacggcccuaaagcguccggaggggacuauuguauucagaguaauaucguuuucucugaugagauuccugccagucaggacaugccgacaaacacaacugauauuaccuacgugggcgacaaugccacguauucagugcccauggucacgagcgaggacgccaauucaccaaauguugcgguaacagcuuucugggccuggccaaauaacacugagacugacuucaaauguaaguggacuuugaccucuggaacuccgucggguugcgagaauaucagcggggccuuugcuuccaacaggacuuucgacaucacugucucagggcuggggacagcaccgaagacauuaaucauaacacggaccgccaccaacgccgcgacuacaacccauaaggugaucuuuuccaaggcaccugaguccaccacuaccuccccgacucuuaacacuacgggcuucgcugaucccaacaccacuacgggguugccuagcucgacacaugugccgacgaaccugacugccccugcaucgaccgggcccacaguuucgaccugggaugugacaucaccaacgcccgcagguacaaccucaggcgccagcccagugaccccuuccccaagccccugggauaauggaacggaguccaaggcuccugauaugacuuccucuaccagccccgugacuacacccacucccaacgcaacuagcccaaccccagcugugacgacgcccaccccgaacgcgacaucucccacaccugcugugacaaccccaaccccuaacgccacuagcccuacccuagguaagaccaguccgacuagcgccguuacaaccccuaccccuaacgcaaccggcccgaccgugggcgagacuuccccgcaagccaaugcgacaaaucacacauugggcgggaccucuccuacaccagucguuacaucucagccuaagaacgcuaccuccgcugucacuaccggacagcacaacaucaccagcucaagcacgaguuccaugagcuugcggccgagcucaaaucccgagacccuaucaccauccacaucagacaacaguacuucacacaugccacucuugacgagcgcucaccccaccggcggcgagaacaucacccaggugacuccggcgucuauuuccacccaccacgucagcacgucgucucccgcaccgagaccagggacgacuucucaggccagugggccuggcaacuccucuacaagcacaaagccaggcgaaguuaacgugacaaagggaacgccuccccagaacgcaaccaguccucaggcgcccagcgggcagaagacugcggugccaacugugaccagcaccgguggcaaggccaacucaacaacuggaggcaagcauacgacggggcacggcgcccggaccuccacugaacccacgaccgauuacggaggugacagcacaacaccgcggccacgauauaaugccaccacuuaucugccaccauccacaagcuccaagcugcggccacgguggaccuucacaagcccacccgugacgacugcccaagcgacggugccagugccaccuacaagccagccacgcuucuccaaccuuaguaugcucguucuccagugggccagccuugcuguucugacccuccuccugcugcucgugauggccgauugcgccuuuaggagaaaccucagcacuagccacacguacaccacgccgcccuacgaugacgccgagacuuacguc

SEQ ID NO: 55 - protein, 865 aa, Artificial Sequence
  Synthetic Polypeptide
MEAALLVCQYTIQSLIHLTGEDPGFFNVEIPEFPFYPTCNVCTYDVNVTFNFDVGGKKHQLDLDFGQLTPHTKAVYQPRGAFGGSENAANLFLLELLGAGELALTMRSKKLPINVTTGEEQQVSLESVDVYFQDVFGTMWCHHAEMQNPVYLIPETVPYIKWDNCNSANITAVVRAQGLDVTLPLSLPTSAQDSNFAVKTEILGNEIDIECIMEDGEISQVLPGDNKFNIACSGYESHVPSGGILTSTSPVATPIPGTGYAYSLRLTPRPVSRFLGNNSILYVFYSGNGPKASGGDYCIQSNIVFSDEIPASQDMPTNTTDITYVGDNATYSVPMVTSEDANSPNVAVTAFWAWPNNTETDFKCKWTLTSGTPSGCENISGAFASNRTFDITVSGLGTAPKTLIITRTATNAATTTHKVIFSKAPESTTTSPTLNTTGFADPNTTTGLPSSTHVPTNLTAPASTGPTVSTWDVTSPTPAGTTSGASPVTPSPSPWDNGTESKAPDMTSSTSPVTTPTPNATSPTPAVTTPTPNATSPTPAVTTPTPNATSPTLGKTSPTSAVTTPTPNATGPTVGETSPQANATNHTLGGTSPTPVVTSQPKNATSAVTTGQHNITSSSTSSMSLRPSSNPETLSPSTSDNSTSHMPLLTSAHPTGGENITQVTPASISTHHVSTSSPAPRPGTTSQASGPGNSSTSTKPGEVNVTKGTPPQNATSPQAPSGQKTAVPTVTSTGGKANSTTGGKHTTGHGARTSTEPTTDYGGDSTTPRPRYNATTYLPPSTSSKLRPRWTFTSPPVTTAQATVPVPPTSQPRFSNLSMLVLQWASLAVLTLLLLLVMADCAFRRNLSTSHTYTTPPYDDAETYV

SEQ ID NO: 56 - RNA, 2595 nt, Artificial Sequence
  Synthetic Polynucleotide
auggaggcagcacugcuggucugccaguauacaauccagucgcucauucaucugacaggcgaggaccccggcuucuuuaacguggaaaucccagaguucccuuucuauccaaccuguaacguuugcacugcugacgugaacguggcgaucaauuucgacgugggaggaaagaagcaucagcuugaucuggauuucggccaacugacgccacacaccaaagcgguguaccaaccaaggggugcauuuggagggagcgagaaugcugcgaaucuguucuuacuggaacugcuuggugcaggagagcuggcacuaaccaugcgaagcaagaagcuccccaucaacguugcgaccggggaagaacagcaagucagccuugaauccguggauguguacuuucaggauguuuucggcaccauguggugucaccacgcugagaugcagaaucccguguaucucauacccgagacuguacccuacaucaagugggauaauugcaauucagcgaauauugcggcuguggugagggcccagggcuuggacgugacucugcccuuaucucuaccuacuucugcccaagacuccaauuucgcggucaagaccgagaugcucgggaaugagaucgauaucgagugcaucauggaggacggugagauaagccagguucugcccggcgacaacaaguucaauaucgcguguucuggcuacgagucccaugugccuagugguggcauacucacaaguacuucucccguagccacgcccauucccggaaccggauacgccuacagucugcgucugaccccacggccuguguccagauuccuggguaacaaugcgaucuuauacguguuuuauagcggaaacggcccuaaagcguccggaggggacuauuguauucagaguaauaucguuuucucugaugagauuccugccagucaggacaugccgacaaacacagcggauauuaccuacgugggcgacaaugccgcguauucagugcccauggucacgagcgaggacgccaauucaccaaauguugcgguaacagcuuucugggccuggccaaauaacgcggagacugacuucaaauguaaguggacuuugaccucuggaacuccgucggguugcgagaauaucgcgggggccuuugcuuccaacagggcguucgacaucacugucucagggcuggggacagcaccgaagacauuaaucauaacacggaccgccaccaacgccgcgacuacaacccauaaggugaucuuuuccaaggcaccugaguccaccacuaccuccccgacucuuaacacugcgggcuucgcugaucccaacaccgcgacgggguugccuagcucgacacaugugccgacgaaccuggcggccccugcaucgaccgggcccacaguuucgaccgccgaugugacaucaccaacgcccgcagguacaaccucaggcgccagcccagugaccccuuccccaagccccugggauaauggagcggaguccaaggcuccugauaugacuuccucuaccagccccgugacuacacccacucccaacgcagcgagcccaaccccagcugugacgacgcccaccccgaacgcggcgucucccacaccugcugugacaaccccaaccccuaacgccgcgagcccuacccuagguaagaccaguccgacuagcgccguuacaaccccuaccccuaacgcagcgggcccgaccgugggcgagacuuccccgcaagccaaugcggcgaaucacgcguugggcgggaccucuccuacaccagucguuacaucucagccuaagaacgcugcguccgcugucacuaccggacagcacaacaucgcgagcucaagcacgaguuccaugagcuugcggccgagcucaaaucccgagacccuaucaccauccacaucagacaacagugcgucacacaugccacucuugacgagcgcucaccccaccggcggcgagaacaucgcgcaggugacuccggcgucuauuuccacccaccacgucagcacgucgucucccgcaccgagaccagggacgacuucucaggccagugggccuggcaacuccgcgacaagcacaaagccaggcgaaguuaacguggcgaagggaacgccuccccagaacgcagcgaguccucaggcgcccagcgggcagaagacugcggugccaacugugaccagcaccgguggcaaggccaacucagcgacuggaggcaagcauacgacggggcacggcgcccggaccuccacugaacccacgaccgauuacggaggugacagcacaacaccgcggccacgauauaaugccgcgacuuaucugccaccauccacaagcuccaagcugcggccacgguggaccuucacaagcccacccgugacgacugcccaagcgacggugccagugccaccuacaagccagccacgcuucuccaaccuugcgaugcucguucuccagugggccagccuugcuguucugacccuccuccugcugcucgugauggccgauugcgccuuuaggagaaaccucgcgacuagccacacguacaccacgccgcccuacgaugacgccgagacuuacguc

SEQ ID NO: 57 - protein, 865 aa, Artificial Sequence
  Synthetic Polypeptide
MEAALLVCQYTIQSLIHLTGEDPGFFNVEIPEFPFYPTCNVCTADVNVAINFDVGGKKHQLDLDFGQLTPHTKAVYQPRGAFGGSENAANLFLLELLGAGELALTMRSKKLPINVATGEEQQVSLESVDVYFQDVFGTMWCHHAEMQNPVYLIPETVPYIKWDNCNSANIAAVVRAQGLDVTLPLSLPTSAQDSNFAVKTEMLGNEIDIECIMEDGEISQVLPGDNKFNIACSGYESHVPSGGILTSTSPVATPIPGTGYAYSLRLTPRPVSRFLGNNAILYVFYSGNGPKASGGDYCIQSNIVFSDEIPASQDMPTNTADITYVGDNAAYSVPMVTSEDANSPNVAVTAFWAWPNNAETDFKCKWTLTSGTPSGCENIAGAFASNRAFDITVSGLGTAPKTLIITRTATNAATTTHKVIFSKAPESTTTSPTLNTAGFADPNTATGLPSSTHVPTNLAAPASTGPTVSTADVTSPTPAGTTSGASPVTPSPSPWDNGAESKAPDMTSSTSPVTTPTPNAASPTPAVTTPTPNAASPTPAVTTPTPNAASPTLGKTSPTSAVTTPTPNAAGPTVGETSPQANAANHALGGTSPTPVVTSQPKNAASAVTTGQHNIASSSTSSMSLRPSSNPETLSPSTSDNSASHMPLLTSAHPTGGENIAQVTPASISTHHVSTSSPAPRPGTTSQASGPGNSATSTKPGEVNVAKGTPPQNAASPQAPSGQKTAVPTVTSTGGKANSATGGKHTTGHGARTSTEPTTDYGGDSTTPRPRYNAATYLPPSTSSKLRPRWTFTSPPVTTAQATVPVPPTSQPRFSNLAMLVLQWASLAVLTLLLLLVMADCAFRRNLATSHTYTTPPYDDAETYV

SEQ ID NO: 58 - RNA, 2595 nt, Artificial Sequence
  Synthetic Polynucleotide
auggaggcagcacugcuggucugccaguauacaauccagucgcucauucaucugacaggcgaggaccccggcuucuuuaacguggaaaucccagaguucccuuucuauccaaccuguaacguuugcacugcugacgugaacguggcgaucaauuucgacgugggaggaaagaagcaucagcuugaucuggauuucggccaacugacgccacacaccaaagcgguguaccaaccaaggggugcauuuggagggagcgagaaugcugcgaaucuguucuuacuggaacugcuuggugcaggagagcuggcacuaaccaugcgaagcaagaagcuccccaucaacguugcgaccggggaagaacagcaagucagccuugaauccguggauguguacuuucaggauguuuucggcaccauguggugucaccacgcugagaugcagaaucccguguaucucauacccgagacuguacccuacaucaagugggauaauugcaauucagcgaauauugcggcuguggugagggcccagggcuuggacgugacucugcccuuaucucuaccuacuucugcccaagacuccaauuucgcggucaagaccgagaugcucgggaaugagaucgauaucgagugcaucauggaggacggugagauaagccagguucugcccggcgacaacaaguucaauaucgcguguucuggcuacgagucccaugugccuagugguggcauacucacaaguacuucucccguagccacgcccauucccggaaccggauacgccuacagucugcgucugaccccacggccuguguccagauuccuggguaacaaugcgaucuuauacguguuuuauagcggaaacggcccuaaagcguccggaggggacuauuguauucagaguaauaucguuuucucugaugagauuccugccagucaggacaugccgacaaacacagcggauauuaccuacgugggcgacaaugccgcguauucagugcccauggucacgagcgaggacgccaauucaccaaauguugcgguaacagcuuucugggccuggccaaauaacgcggagacugacuucaaauguaaguggacuuugaccucuggaacuccgucggguugcgagaauaucgcgggggccuuugcuuccaacagggcguucgacaucacugucucagggcuggggacagcaccgaagacauuaaucauaacacggaccgccaccaacgccgcgacuacaacccauaaggugaucuuuuccaaggcaccugaguccaccacuaccuccccgacucuuaacacugcgggcuucgcugaucccaacaccgcgacgggguugccuagcucgacacaugugccgacgaaccuggcggccccugcaucgaccgggcccacaguuucgaccgccgaugugacaucaccaacgcccgcagguacaaccucaggcgccagcccagugaccccuuccccaagccccugggauaauggaacggaguccaaggcuccugauaugacuuccucuaccagccccgugacuacacccacucccaacgcaacuagcccaaccccagcugugacgacgcccaccccgaacgcgacaucucccacaccugcugugacaaccccaaccccuaacgccacuagcccuacccuagguaagaccaguccgacuagcgccguuacaaccccuaccccuaacgcaaccggcccgaccgugggcgagacuuccccgcaagccaaugcgacaaaucacacauugggcgggaccucuccuacaccagucguuacaucucagccuaagaacgcuaccuccgcugucacuaccggacagcacaacaucaccagcucaagcacgaguuccaugagcuugcggccgagcucaaaucccgagacccuaucaccauccacaucagacaacaguacuucacacaugccacucuugacgagcgcucaccccaccggcggcgagaacaucacccaggugacuccggcgucuauuuccacccaccacgucagcacgucgucucccgcaccgagaccagggacgacuucucaggccagugggccuggcaacuccucuacaagcacaaagccaggcgaaguuaacgugacaaagggaacgccuccccagaacgcaaccaguccucaggcgcccagcgggcagaagacugcggugccaacugugaccagcaccgguggcaaggccaacucaacaacuggaggcaagcauacgacggggcacggcgcccggaccuccacugaacccacgaccgauuacggaggugacagcacaacaccgcggccacgauauaaugccaccacuuaucugccaccauccacaagcuccaagcugcggccacgguggaccuucacaagcccacccgugacgacugcccaagcgacggugccagugccaccuacaagccagccacgcuucuccaaccuuaguaugcucguucuccagugggccagccuugcuguucugacccuccuccugcugcucgugauggccgauugcgccuuuaggagaaaccucagcacuagccacacguacaccacgccgcccuacgaugacgccgagacuuacguc

SEQ ID NO: 59 - protein, 865 aa, Artificial Sequence
  Synthetic Polypeptide
MEAALLVCQYTIQSLIHLTGEDPGFFNVEIPEFPFYPTCNVCTADVNVAINFDVGGKKHQLDLDFGQLTPHTKAVYQPRGAFGGSENAANLFLLELLGAGELALTMRSKKLPINVATGEEQQVSLESVDVYFQDVFGTMWCHHAEMQNPVYLIPETVPYIKWDNCNSANIAAVVRAQGLDVTLPLSLPTSAQDSNFAVKTEMLGNEIDIECIMEDGEISQVLPGDNKFNIACSGYESHVPSGGILTSTSPVATPIPGTGYAYSLRLTPRPVSRFLGNNAILYVFYSGNGPKASGGDYCIQSNIVFSDEIPASQDMPTNTADITYVGDNAAYSVPMVTSEDANSPNVAVTAFWAWPNNAETDFKCKWTLTSGTPSGCENIAGAFASNRAFDITVSGLGTAPKTLIITRTATNAATTTHKVIFSKAPESTTTSPTLNTAGFADPNTATGLPSSTHVPTNLAAPASTGPTVSTADVTSPTPAGTTSGASPVTPSPSPWDNGTESKAPDMTSSTSPVTTPTPNATSPTPAVTTPTPNATSPTPAVTTPTPNATSPTLGKTSPTSAVTTPTPNATGPTVGETSPQANATNHTLGGTSPTPVVTSQPKNATSAVTTGQHNITSSSTSSMSLRPSSNPETLSPSTSDNSTSHMPLLTSAHPTGGENITQVTPASISTHHVSTSSPAPRPGTTSQASGPGNSSTSTKPGEVNVTKGTPPQNATSPQAPSGQKTAVPTVTSTGGKANSTTGGKHTTGHGARTSTEPTTDYGGDSTTPRPRYNATTYLPPSTSSKLRPRWTFTSPPVTTAQATVPVPPTSQPRFSNLSMLVLQWASLAVLTLLLLLVMADCAFRRNLSTSHTYTTPPYDDAETYV

SEQ ID NO: 60 - RNA, 2595 nt, Artificial Sequence
  Synthetic Polynucleotide
auggaggcagcacugcuggucugccaguauacaauccagucgcucauucaucugacaggcgaggaccccggcuucuuuaacguggaaaucccagaguucccuuucuauccaaccuguaacguuugcacugcugacgugaacgugacaaucaauuucgacgugggaggaaagaagcaucagcuugaucuggauuucggccaacugacgccacacaccaaagcgguguaccaaccaaggggugcauuuggagggagcgagaaugcugcgaaucuguucuuacuggaacugcuuggugcaggagagcuggcacuaaccaugcgaagcaagaagcuccccaucaacguuaccaccggggaagaacagcaagucagccuugaauccguggauguguacuuucaggauguuuucggcaccauguggugucaccacgcugagaugcagaaucccguguaucucauacccgagacuguacccuacaucaagugggauaauugcaauucaacuaauauuacggcuguggugagggcccagggcuuggacgugacucugcccuuaucucuaccuacuucugcccaagacuccaauuucucugucaagaccgagaugcucgggaaugagaucgauaucgagugcaucauggaggacggugagauaagccagguucugcccggcgacaacaaguucaauaucacuuguucuggcuacgagucccaugugccuagugguggcauacucacaaguacuucucccguagccacgcccauucccggaaccggauacgccuacagucugcgucugaccccacggccuguguccagauuccuggguaacaauaguaucuuauacguguuuuauagcggaaacggcccuaaagcguccggaggggacuauuguauucagaguaauaucguuuucucugaugagauuccugccagucaggacaugccgacaaacacaacugauauuaccuacgugggcgacaaugccacguauucagugcccauggucacgagcgaggacgccaauucaccaaauguuacuguaacagcuuucugggccuggccaaauaacacugagacugacuucaaauguaaguggacuuugaccucuggaacuccgucggguugcgagaauaucagcggggccuuugcuuccaacaggacuuucgacaucacugucucagggcuggggacagcaccgaagacauuaaucauaacacggaccgccaccaacgccacgacuacaacccauaaggugaucuuuuccaaggcaccugaguccaccacuaccuccccgacucuuaacacuacgggcuucgcugaucccaacaccacuacgggguugccuagcucgacacaugugccgacgaaccugacugccccugcaucgaccgggcccacaguuucgaccgccgaugugacaucaccaacgcccgcagguacaaccucaggcgccagcccagugaccccuuccccaagccccugggauaauggaacggaguccaaggcuccugauaugacuuccucuaccagccccgugacuacacccacucccaacgcaacuagcccaaccccagcugugacgacgcccaccccgaacgcgacaucucccacaccugcugugacaaccccaaccccuaacgccacuagcccuacccuagguaagaccaguccgacuagcgccguuacaaccccuaccccuaacgcaaccggcccgaccgugggcgagacuuccccgcaagccaaugcgacaaaucacacauugggcgggaccucuccuacaccagucguuacaucucagccuaagaacgcuaccuccgcugucacuaccggacagcacaacaucaccagcucaagcacgaguuccaugagcuugcggccgagcucaaaucccgagacccuaucaccauccacaucagacaacaguacuucacacaugccacucuugacgagcgcucaccccaccggcggcgagaacaucacccaggugacuccggcgucuauuuccacccaccacgucagcacgucgucucccgcaccgagaccagggacgacuucucaggccagugggccuggcaacuccucuacaagcacaaagccaggcgaaguuaacgugacaaagggaacgccuccccagaacgcaaccaguccucaggcgcccagcgggcagaagacugcggugccaacugugaccagcaccgguggcaaggccaacucaacaacuggaggcaagcauacgacggggcacggcgcccggaccuccacugaacccacgaccgauuacggaggugacagcacaacaccgcggccacgauauaaugccaccacuuaucugccaccauccacaagcuccaagcugcggccacgguggaccuucacaagcccacccgugacgacugcccaagcgacggugccagugccaccuacaagccagccacgcuucuccaaccuuaguaugcucguucuccagugggccagccuugcuguucugacccuccuccugcugcucgugauggccgauugcgccuuuaggagaaaccucagcacuagccacacguacaccacgccgcccuacgaugacgccgagacuuacguc

SEQ ID NO: 61 - protein, 865 aa, Artificial Sequence
  Synthetic Polypeptide
MEAALLVCQYTIQSLIHLTGEDPGFFNVEIPEFPFYPTCNVCTADVNVTINFDVGGKKHQLDLDFGQLTPHTKAVYQPRGAFGGSENAANLFLLELLGAGELALTMRSKKLPINVTTGEEQQVSLESVDVYFQDVFGTMWCHHAEMQNPVYLIPETVPYIKWDNCNSTNITAVVRAQGLDVTLPLSLPTSAQDSNFSVKTEMLGNEIDIECIMEDGEISQVLPGDNKFNITCSGYESHVPSGGILTSTSPVATPIPGTGYAYSLRLTPRPVSRFLGNNSILYVFYSGNGPKASGGDYCIQSNIVFSDEIPASQDMPTNTTDITYVGDNATYSVPMVTSEDANSPNVTVTAFWAWPNNTETDFKCKWTLTSGTPSGCENISGAFASNRTFDITVSGLGTAPKTLIITRTATNATTTTHKVIFSKAPESTTTSPTLNTTGFADPNTTTGLPSSTHVPTNLTAPASTGPTVSTADVTSPTPAGTTSGASPVTPSPSPWDNGTESKAPDMTSSTSPVTTPTPNATSPTPAVTTPTPNATSPTPAVTTPTPNATSPTLGKTSPTSAVTTPTPNATGPTVGETSPQANATNHTLGGTSPTPVVTSQPKNATSAVTTGQHNITSSSTSSMSLRPSSNPETLSPSTSDNSTSHMPLLTSAHPTGGENITQVTPASISTHHVSTSSPAPRPGTTSQASGPGNSSTSTKPGEVNVTKGTPPQNATSPQAPSGQKTAVPTVTSTGGKANSTTGGKHTTGHGARTSTEPTTDYGGDSTTPRPRYNATTYLPPSTSSKLRPRWTFTSPPVTTAQATVPVPPTSQPRFSNLSMLVLQWASLAVLTLLLLLVMADCAFRRNLSTSHTYTTPPYDDAETYV

SEQ ID NO: 62 - RNA, 2595 nt, Artificial Sequence
  Synthetic Polynucleotide
auggaggcagcacugcuggucugccaguauacaauccagucgcucauucaucugacaggcgaggaccccggcuucuuuaacguggaaaucccagaguucccuuucuauccaaccuguaacguuugcacugcugacgugaacgugacaaucaauuucgacgugggaggaaagaagcaucagcuugaucuggauuucggccaacugacgccacacaccaaagcgguguaccaaccaaggggugcauuuggagggagcgagaaugcuacaaaucuguucuuacuggaacugcuuggugcaggagagcuggcacuaaccaugcgaagcaagaagcuccccaucaacguuaccaccggggaagaacagcaagucagccuugaauccguggauguguacuuucaggauguuuucggcaccauguggugucaccacgcugagaugcagaaucccguguaucucauacccgagacuguacccuacaucaagugggauaauugcaauucagcgaauauuacggcuguggugagggcccagggcuuggacgugacucugcccuuaucucuaccuacuucugcccaagacuccaauuucucugucaagaccgagaugcucgggaaugagaucgauaucgagugcaucauggaggacggugagauaagccagguucugcccggcgacaacaaguucaauaucacuuguucuggcuacgagucccaugugccuagugguggcauacucacaaguacuucucccguagccacgcccauucccggaaccggauacgccuacagucugcgucugaccccacggccuguguccagauuccuggguaacaauaguaucuuauacguguuuuauagcggaaacggcccuaaagcguccggaggggacuauuguauucagaguaauaucguuuucucugaugagauuccugccagucaggacaugccgacaaacacaacugauauuaccuacgugggcgacaaugccacguauucagugcccauggucacgagcgaggacgccaauucaccaaauguuacuguaacagcuuucugggccuggccaaauaacacugagacugacuucaaauguaaguggacuuugaccucuggaacuccgucggguugcgagaauaucagcggggccuuugcuuccaacaggacuuucgacaucacugucucagggcuggggacagcaccgaagacauuaaucauaacacggaccgccaccaacgccacgacuacaacccauaaggugaucuuuuccaaggcaccugaguccaccacuaccuccccgacucuuaacacuacgggcuucgcugaucccaacaccacuacgggguugccuagcucgacacaugugccgacgaaccugacugccccugcaucgaccgggcccacaguuucgaccgccgaugugacaucaccaacgcccgcagguacaaccucaggcgccagcccagugaccccuuccccaagccccugggauaauggaacggaguccaaggcuccugauaugacuuccucuaccagccccgugacuacacccacucccaacgcaacuagcccaaccccagcugugacgacgcccaccccgaacgcgacaucucccacaccugcugugacaaccccaaccccuaacgccacuagcccuacccuagguaagaccaguccgacuagcgccguuacaaccccuaccccuaacgcaaccggcccgaccgugggcgagacuuccccgcaagccaaugcgacaaaucacacauugggcgggaccucuccuacaccagucguuacaucucagccuaagaacgcuaccuccgcugucacuaccggacagcacaacaucaccagcucaagcacgaguuccaugagcuugcggccgagcucaaaucccgagacccuaucaccauccacaucagacaacaguacuucacacaugccacucuugacgagcgcucaccccaccggcggcgagaacaucacccaggugacuccggcgucuauuuccacccaccacgucagcacgucgucucccgcaccgagaccagggacgacuucucaggccagugggccuggcaacuccucuacaagcacaaagccaggcgaaguuaacgugacaaagggaacgccuccccagaacgcaaccaguccucaggcgcccagcgggcagaagacugcggugccaacugugaccagcaccgguggcaaggccaacucaacaacuggaggcaagcauacgacggggcacggcgcccggaccuccacugaacccacgaccgauuacggaggugacagcacaacaccgcggccacgauauaaugccaccacuuaucugccaccauccacaagcuccaagcugcggccacgguggaccuucacaagcccacccgugacgacugcccaagcgacggugccagugccaccuacaagccagccacgcuucuccaaccuuaguaugcucguucuccagugggccagccuugcuguucugacccuccuccugcugcucgugauggccgauugcgccuuuaggagaaaccucagcacuagccacacguacaccacgccgcccuacgaugacgccgagacuuacguc

SEQ ID NO: 63 - protein, 865 aa, Artificial Sequence
  Synthetic Polypeptide
MEAALLVCQYTIQSLIHLTGEDPGFFNVEIPEFPFYPTCNVCTADVNVTINFDVGGKKHQLDLDFGQLTPHTKAVYQPRGAFGGSENATNLFLLELLGAGELALTMRSKKLPINVTTGEEQQVSLESVDVYFQDVFGTMWCHHAEMQNPVYLIPETVPYIKWDNCNSANITAVVRAQGLDVTLPLSLPTSAQDSNFSVKTEMLGNEIDIECIMEDGEISQVLPGDNKFNITCSGYESHVPSGGILTSTSPVATPIPGTGYAYSLRLTPRPVSRFLGNNSILYVFYSGNGPKASGGDYCIQSNIVFSDEIPASQDMPTNTTDITYVGDNATYSVPMVTSEDANSPNVTVTAFWAWPNNTETDFKCKWTLTSGTPSGCENISGAFASNRTFDITVSGLGTAPKTLIITRTATNATTTTHKVIFSKAPESTTTSPTLNTTGFADPNTTTGLPSSTHVPTNLTAPASTGPTVSTADVTSPTPAGTTSGASPVTPSPSPWDNGTESKAPDMTSSTSPVTTPTPNATSPTPAVTTPTPNATSPTPAVTTPTPNATSPTLGKTSPTSAVTTPTPNATGPTVGETSPQANATNHTLGGTSPTPVVTSQPKNATSAVTTGQHNITSSSTSSMSLRPSSNPETLSPSTSDNSTSHMPLLTSAHPTGGENITQVTPASISTHHVSTSSPAPRPGTTSQASGPGNSSTSTKPGEVNVTKGTPPQNATSPQAPSGQKTAVPTVTSTGGKANSTTGGKHTTGHGARTSTEPTTDYGGDSTTPRPRYNATTYLPPSTSSKLRPRWTFTSPPVTTAQATVPVPPTSQPRFSNLSMLVLQWASLAVLTLLLLLVMADCAFRRNLSTSHTYTTPPYDDAETYV

SEQ ID NO: 64 - RNA, 2595 nt, Artificial Sequence
  Synthetic Polynucleotide
auggaggcagcacugcuggucugccaguauacaauccagucgcucauucaucugacaggcgaggaccccggcuucuuuaacguggaaaucccagaguucccuuucuauccaaccuguaacguuugcacugcugacgugaacgugacaaucaauuucgacgugggaggaaagaagcaucagcuugaucuggauuucggccaacugacgccacacaccaaagcgguguaccaaccaaggggugcauuuggagggagcgagaaugcuacaaaucuguucuuacuggaacugcuuggugcaggagagcuggcacuaaccaugcgaagcaagaagcuccccaucaacguuaccaccggggaagaacagcaagucagccuugaauccguggauguguacuuucaggauguuuucggcaccauguggugucaccacgcugagaugcagaaucccguguaucucauacccgagacuguacccuacaucaagugggauaauugcaauucaacuaauauuacggcuguggugagggcccagggcuuggacgugacucugcccuuaucucuaccuacuucugcccaagacuccaauuucgcggucaagaccgagaugcucgggaaugagaucgauaucgagugcaucauggaggacggugagauaagccagguucugcccggcgacaacaaguucaauaucacuuguucuggcuacgagucccaugugccuagugguggcauacucacaaguacuucucccguagccacgcccauucccggaaccggauacgccuacagucugcgucugaccccacggccuguguccagauuccuggguaacaauaguaucuuauacguguuuuauagcggaaacggcccuaaagcguccggaggggacuauuguauucagaguaauaucguuuucucugaugagauuccugccagucaggacaugccgacaaacacaacugauauuaccuacgugggcgacaaugccacguauucagugcccauggucacgagcgaggacgccaauucaccaaauguuacuguaacagcuuucugggccuggccaaauaacacugagacugacuucaaauguaaguggacuuugaccucuggaacuccgucggguugcgagaauaucagcggggccuuugcuuccaacaggacuuucgacaucacugucucagggcuggggacagcaccgaagacauuaaucauaacacggaccgccaccaacgccacgacuacaacccauaaggugaucuuuuccaaggcaccugaguccaccacuaccuccccgacucuuaacacuacgggcuucgcugaucccaacaccacuacgggguugccuagcucgacacaugugccgacgaaccugacugccccugcaucgaccgggcccacaguuucgaccgccgaugugacaucaccaacgcccgcagguacaaccucaggcgccagcccagugaccccuuccccaagccccugggauaauggaacggaguccaaggcuccugauaugacuuccucuaccagccccgugacuacacccacucccaacgcaacuagcccaaccccagcugugacgacgcccaccccgaacgcgacaucucccacaccugcugugacaaccccaaccccuaacgccacuagcccuacccuagguaagaccaguccgacuagcgccguuacaaccccuaccccuaacgcaaccggcccgaccgugggcgagacuuccccgcaagccaaugcgacaaaucacacauugggcgggaccucuccuacaccagucguuacaucucagccuaagaacgcuaccuccgcugucacuaccggacagcacaacaucaccagcucaagcacgaguuccaugagcuugcggccgagcucaaaucccgagacccuaucaccauccacaucagacaacaguacuucacacaugccacucuugacgagcgcucaccccaccggcggcgagaacaucacccaggugacuccggcgucuauuuccacccaccacgucagcacgucgucucccgcaccgagaccagggacgacuucucaggccagugggccuggcaacuccucuacaagcacaaagccaggcgaaguuaacgugacaaagggaacgccuccccagaacgcaaccaguccucaggcgcccagcgggcagaagacugcggugccaacugugaccagcaccgguggcaaggccaacucaacaacuggaggcaagcauacgacggggcacggcgcccggaccuccacugaacccacgaccgauuacggaggugacagcacaacaccgcggccacgauauaaugccaccacuuaucugccaccauccacaagcuccaagcugcggccacgguggaccuucacaagcccacccgugacgacugcccaagcgacggugccagugccaccuacaagccagccacgcuucuccaaccuuaguaugcucguucuccagugggccagccuugcuguucugacccuccuccugcugcucgugauggccgauugcgccuuuaggagaaaccucagcacuagccacacguacaccacgccgcccuacgaugacgccgagacuuacguc

SEQ ID NO: 65 - protein, 865 aa, Artificial Sequence
  Synthetic Polypeptide
MEAALLVCQYTIQSLIHLTGEDPGFFNVEIPEFPFYPTCNVCTADVNVTINFDVGGKKHQLDLDFGQLTPHTKAVYQPRGAFGGSENATNLFLLELLGAGELALTMRSKKLPINVTTGEEQQVSLESVDVYFQDVFGTMWCHHAEMQNPVYLIPETVPYIKWDNCNSTNITAVVRAQGLDVTLPLSLPTSAQDSNFAVKTEMLGNEIDIECIMEDGEISQVLPGDNKFNITCSGYESHVPSGGILTSTSPVATPIPGTGYAYSLRLTPRPVSRFLGNNSILYVFYSGNGPKASGGDYCIQSNIVFSDEIPASQDMPTNTTDITYVGDNATYSVPMVTSEDANSPNVTVTAFWAWPNNTETDFKCKWTLTSGTPSGCENISGAFASNRTFDITVSGLGTAPKTLIITRTATNATTTTHKVIFSKAPESTTTSPTLNTTGFADPNTTTGLPSSTHVPTNLTAPASTGPTVSTADVTSPTPAGTTSGASPVTPSPSPWDNGTESKAPDMTSSTSPVTTPTPNATSPTPAVTTPTPNATSPTPAVTTPTPNATSPTLGKTSPTSAVTTPTPNATGPTVGETSPQANATNHTLGGTSPTPVVTSQPKNATSAVTTGQHNITSSSTSSMSLRPSSNPETLSPSTSDNSTSHMPLLTSAHPTGGENITQVTPASISTHHVSTSSPAPRPGTTSQASGPGNSSTSTKPGEVNVTKGTPPQNATSPQAPSGQKTAVPTVTSTGGKANSTTGGKHTTGHGARTSTEPTTDYGGDSTTPRPRYNATTYLPPSTSSKLRPRWTFTSPPVTTAQATVPVPPTSQPRFSNLSMLVLQWASLAVLTLLLLLVMADCAFRRNLSTSHTYTTPPYDDAETYV

SEQ ID NO: 66 - RNA, 2595 nt, Artificial Sequence
  Synthetic Polynucleotide
auggaggcagcacugcuggucugccaguauacaauccagucgcucauucaucugacaggcgaggaccccggcuucuuuaacguggaaaucccagaguucccuuucuauccaaccuguaacguuugcacugcugacgugaacgugacaaucaauuucgacgugggaggaaagaagcaucagcuugaucuggauuucggccaacugacgccacacaccaaagcgguguaccaaccaaggggugcauuuggagggagcgagaaugcuacaaaucuguucuuacuggaacugcuuggugcaggagagcuggcacuaaccaugcgaagcaagaagcuccccaucaacguuaccaccggggaagaacagcaagucagccuugaauccguggauguguacuuucaggauguuuucggcaccauguggugucaccacgcugagaugcagaaucccguguaucucauacccgagacuguacccuacaucaagugggauaauugcaauucaacuaauauuacggcuguggugagggcccagggcuuggacgugacucugcccuuaucucuaccuacuucugcccaagacuccaauuucucugucaagaccgagaugcucgggaaugagaucgauaucgagugcaucauggaggacggugagauaagccagguucugcccggcgacaacaaguucaauaucgcguguucuggcuacgagucccaugugccuagugguggcauacucacaaguacuucucccguagccacgcccauucccggaaccggauacgccuacagucugcgucugaccccacggccuguguccagauuccuggguaacaauaguaucuuauacguguuuuauagcggaaacggcccuaaagcguccggaggggacuauuguauucagaguaauaucguuuucucugaugagauuccugccagucaggacaugccgacaaacacaacugauauuaccuacgugggcgacaaugccacguauucagugcccauggucacgagcgaggacgccaauucaccaaauguuacuguaacagcuuucugggccuggccaaauaacacugagacugacuucaaauguaaguggacuuugaccucuggaacuccgucggguugcgagaauaucagcggggccuuugcuuccaacaggacuuucgacaucacugucucagggcuggggacagcaccgaagacauuaaucauaacacggaccgccaccaacgccacgacuacaacccauaaggugaucuuuuccaaggcaccugaguccaccacuaccuccccgacucuuaacacuacgggcuucgcugaucccaacaccacuacgggguugccuagcucgacacaugugccgacgaaccugacugccccugcaucgaccgggcccacaguuucgaccgccgaugugacaucaccaacgcccgcagguacaaccucaggcgccagcccagugaccccuuccccaagccccugggauaauggaacggaguccaaggcuccugauaugacuuccucuaccagccccgugacuacacccacucccaacgcaacuagcccaaccccagcugugacgacgcccaccccgaacgcgacaucucccacaccugcugugacaaccccaaccccuaacgccacuagcccuacccuagguaagaccaguccgacuagcgccguuacaaccccuaccccuaacgcaaccggcccgaccgugggcgagacuuccccgcaagccaaugcgacaaaucacacauugggcgggaccucuccuacaccagucguuacaucucagccuaagaacgcuaccuccgcugucacuaccggacagcacaacaucaccagcucaagcacgaguuccaugagcuugcggccgagcucaaaucccgagacccuaucaccauccacaucagacaacaguacuucacacaugccacucuugacgagcgcucaccccaccggcggcgagaacaucacccaggugacuccggcgucuauuuccacccaccacgucagcacgucgucucccgcaccgagaccagggacgacuucucaggccagugggccuggcaacuccucuacaagcacaaagccaggcgaaguuaacgugacaaagggaacgccuccccagaacgcaaccaguccucaggcgcccagcgggcagaagacugcggugccaacugugaccagcaccgguggcaaggccaacucaacaacuggaggcaagcauacgacggggcacggcgcccggaccuccacugaacccacgaccgauuacggaggugacagcacaacaccgcggccacgauauaaugccaccacuuaucugccaccauccacaagcuccaagcugcggccacgguggaccuucacaagcccacccgugacgacugcccaagcgacggugccagugccaccuacaagccagccacgcuucuccaaccuuaguaugcucguucuccagugggccagccuugcuguucugacccuccuccugcugcucgugauggccgauugcgccuuuaggagaaaccucagcacuagccacacguacaccacgccgcccuacgaugacgccgagacuuacguc

SEQ ID NO: 67 - protein, 865 aa, Artificial Sequence
  Synthetic Polypeptide
MEAALLVCQYTIQSLIHLTGEDPGFFNVEIPEFPFYPTCNVCTADVNVTINFDVGGKKHQLDLDFGQLTPHTKAVYQPRGAFGGSENATNLFLLELLGAGELALTMRSKKLPINVTTGEEQQVSLESVDVYFQDVFGTMWCHHAEMQNPVYLIPETVPYIKWDNCNSTNITAVVRAQGLDVTLPLSLPTSAQDSNFSVKTEMLGNEIDIECIMEDGEISQVLPGDNKFNIACSGYESHVPSGGILTSTSPVATPIPGTGYAYSLRLTPRPVSRFLGNNSILYVFYSGNGPKASGGDYCIQSNIVFSDEIPASQDMPTNTTDITYVGDNATYSVPMVTSEDANSPNVTVTAFWAWPNNTETDFKCKWTLTSGTPSGCENISGAFASNRTFDITVSGLGTAPKTLIITRTATNATTTTHKVIFSKAPESTTTSPTLNTTGFADPNTTTGLPSSTHVPTNLTAPASTGPTVSTADVTSPTPAGTTSGASPVTPSPSPWDNGTESKAPDMTSSTSPVTTPTPNATSPTPAVTTPTPNATSPTPAVTTPTPNATSPTLGKTSPTSAVTTPTPNATGPTVGETSPQANATNHTLGGTSPTPVVTSQPKNATSAVTTGQHNITSSSTSSMSLRPSSNPETLSPSTSDNSTSHMPLLTSAHPTGGENITQVTPASISTHHVSTSSPAPRPGTTSQASGPGNSSTSTKPGEVNVTKGTPPQNATSPQAPSGQKTAVPTVTSTGGKANSTTGGKHTTGHGARTSTEPTTDYGGDSTTPRPRYNATTYLPPSTSSKLRPRWTFTSPPVTTAQATVPVPPTSQPRFSNLSMLVLQWASLAVLTLLLLLVMADCAFRRNLSTSHTYTTPPYDDAETYV

SEQ ID NO: 68 - RNA, 2595 nt, Artificial Sequence
  Synthetic Polynucleotide
auggaggcagcacugcuggucugccaguauacaauccagucgcucauucaucugacaggcgaggaccccggcuucuuuaacguggaaaucccagaguucccuuucuauccaaccuguaacguuugcacugcugacgugaacgugacaaucaauuucgacgugggaggaaagaagcaucagcuugaucuggauuucggccaacugacgccacacaccaaagcgguguaccaaccaaggggugcauuuggagggagcgagaaugcuacaaaucuguucuuacuggaacugcuuggugcaggagagcuggcacuaaccaugcgaagcaagaagcuccccaucaacguuaccaccggggaagaacagcaagucagccuugaauccguggauguguacuuucaggauguuuucggcaccauguggugucaccacgcugagaugcagaaucccguguaucucauacccgagacuguacccuacaucaagugggauaauugcaauucaacuaauauuacggcuguggugagggcccagggcuuggacgugacucugcccuuaucucuaccuacuucugcccaagacuccaauuucucugucaagaccgagaugcucgggaaugagaucgauaucgagugcaucauggaggacggugagauaagccagguucugcccggcgacaacaaguucaauaucacuuguucuggcuacgagucccaugugccuagugguggcauacucacaaguacuucucccguagccacgcccauucccggaaccggauacgccuacagucugcgucugaccccacggccuguguccagauuccuggguaacaauaguaucuuauacguguuuuauagcggaaacggcccuaaagcguccggaggggacuauuguauucagaguaauaucguuuucucugaugagauuccugccagucaggacaugccgacaaacacaacugauauuaccuacgugggcgacaaugccacguauucagugcccauggucacgagcgaggacgccaauucaccaaauguugcgguaacagcuuucugggccuggccaaauaacacugagacugacuucaaauguaaguggacuuugaccucuggaacuccgucggguugcgagaauaucagcggggccuuugcuuccaacaggacuuucgacaucacugucucagggcuggggacagcaccgaagacauuaaucauaacacggaccgccaccaacgccacgacuacaacccauaaggugaucuuuuccaaggcaccugaguccaccacuaccuccccgacucuuaacacuacgggcuucgcugaucccaacaccacuacgggguugccuagcucgacacaugugccgacgaaccugacugccccugcaucgaccgggcccacaguuucgaccgccgaugugacaucaccaacgcccgcagguacaaccucaggcgccagcccagugaccccuuccccaagccccugggauaauggaacggaguccaaggcuccugauaugacuuccucuaccagccccgugacuacacccacucccaacgcaacuagcccaaccccagcugugacgacgcccaccccgaacgcgacaucucccacaccugcugugacaaccccaaccccuaacgccacuagcccuacccuagguaagaccaguccgacuagcgccguuacaaccccuaccccuaacgcaaccggcccgaccgugggcgagacuuccccgcaagccaaugcgacaaaucacacauugggcgggaccucuccuacaccagucguuacaucucagccuaagaacgcuaccuccgcugucacuaccggacagcacaacaucaccagcucaagcacgaguuccaugagcuugcggccgagcucaaaucccgagacccuaucaccauccacaucagacaacaguacuucacacaugccacucuugacgagcgcucaccccaccggcggcgagaacaucacccaggugacuccggcgucuauuuccacccaccacgucagcacgucgucucccgcaccgagaccagggacgacuucucaggccagugggccuggcaacuccucuacaagcacaaagccaggcgaaguuaacgugacaaagggaacgccuccccagaacgcaaccaguccucaggcgcccagcgggcagaagacugcggugccaacugugaccagcaccgguggcaaggccaacucaacaacuggaggcaagcauacgacggggcacggcgcccggaccuccacugaacccacgaccgauuacggaggugacagcacaacaccgcggccacgauauaaugccaccacuuaucugccaccauccacaagcuccaagcugcggccacgguggaccuucacaagcccacccgugacgacugcccaagcgacggugccagugccaccuacaagccagccacgcuucuccaaccuuaguaugcucguucuccagugggccagccuugcuguucugacccuccuccugcugcucgugauggccgauugcgccuuuaggagaaaccucagcacuagccacacguacaccacgccgcccuacgaugacgccgagacuuacguc

SEQ ID NO: 69 - RNA, 2595 nt, Artificial Sequence
  Synthetic Polynucleotide
auggaggcagcacugcuggucugccaguauacaauccagucgcucauucaucugacaggcgaggaccccggcuucuuuaacguggaaaucccagaguucccuuucuauccaaccuguaacguuugcacugcugacgugaacgugacaaucaauuucgacgugggaggaaagaagcaucagcuugaucuggauuucggccaacugacgccacacaccaaagcgguguaccaaccaaggggugcauuuggagggagcgagaaugcuacaaaucuguucuuacuggaacugcuuggugcaggagagcuggcacuaaccaugcgaagcaagaagcuccccaucaacguuaccaccggggaagaacagcaagucagccuugaauccguggauguguacuuucaggauguuuucggcaccauguggugucaccacgcugagaugcagaaucccguguaucucauacccgagacuguacccuacaucaagugggauaauugcaauucaacuaauauuacggcuguggugagggcccagggcuuggacgugacucugcccuuaucucuaccuacuucugcccaagacuccaauuucucugucaagaccgagaugcucgggaaugagaucgauaucgagugcaucauggaggacggugagauaagccagguucugcccggcgacaacaaguucaauaucacuuguucuggcuacgagucccaugugccuagugguggcauacucacaaguacuucucccguagccacgcccauucccggaaccggauacgccuacagucugcgucugaccccacggccuguguccagauuccuggguaacaauaguaucuuauacguguuuuauagcggaaacggcccuaaagcguccggaggggacuauuguauucagaguaauaucguuuucucugaugagauuccugccagucaggacaugccgacaaacacaacugauauuaccuacgugggcgacaaugccacguauucagugcccauggucacgagcgaggacgccaauucaccaaauguuacuguaacagcuuucugggccuggccaaauaacacugagacugacuucaaauguaaguggacuuugaccucuggaacuccgucggguugcgagaauaucagcggggccuuugcuuccaacaggacuuucgacaucacugucucagggcuggggacagcaccgaagacauuaaucauaacacggaccgccaccaacgccgcgacuacaacccauaaggugaucuuuuccaaggcaccugaguccaccacuaccuccccgacucuuaacacuacgggcuucgcugaucccaacaccacuacgggguugccuagcucgacacaugugccgacgaaccugacugccccugcaucgaccgggcccacaguuucgaccgccgaugugacaucaccaacgcccgcagguacaaccucaggcgccagcccagugaccccuuccccaagccccugggauaauggaacggaguccaaggcuccugauaugacuuccucuaccagccccgugacuacacccacucccaacgcaacuagcccaaccccagcugugacgacgcccaccccgaacgcgacaucucccacaccugcugugacaaccccaaccccuaacgccacuagcccuacccuagguaagaccaguccgacuagcgccguuacaaccccuaccccuaacgcaaccggcccgaccgugggcgagacuuccccgcaagccaaugcgacaaaucacacauugggcgggaccucuccuacaccagucguuacaucucagccuaagaacgcuaccuccgcugucacuaccggacagcacaacaucaccagcucaagcacgaguuccaugagcuugcggccgagcucaaaucccgagacccuaucaccauccacaucagacaacaguacuucacacaugccacucuugacgagcgcucaccccaccggcggcgagaacaucacccaggugacuccggcgucuauuuccacccaccacgucagcacgucgucucccgcaccgagaccagggacgacuucucaggccagugggccuggcaacuccucuacaagcacaaagccaggcgaaguuaacgugacaaagggaacgccuccccagaacgcaaccaguccucaggcgcccagcgggcagaagacugcggugccaacugugaccagcaccgguggcaaggccaacucaacaacuggaggcaagcauacgacggggcacggcgcccggaccuccacugaacccacgaccgauuacggaggugacagcacaacaccgcggccacgauauaaugccaccacuuaucugccaccauccacaagcuccaagcugcggccacgguggaccuucacaagcccacccgugacgacugcccaagcgacggugccagugccaccuacaagccagccacgcuucuccaaccuuaguaugcucguucuccagugggccagccuugcuguucugacccuccuccugcugcucgugauggccgauugcgccuuuaggagaaaccucagcacuagccacacguacaccacgccgcccuacgaugacgccgagacuuacguc

SEQ ID NO: 70 - protein, 865 aa, Artificial Sequence
  Synthetic Polypeptide
MEAALLVCQYTIQSLIHLTGEDPGFFNVEIPEFPFYPTCNVCTADVNVTINFDVGGKKHQLDLDFGQLTPHTKAVYQPRGAFGGSENATNLFLLELLGAGELALTMRSKKLPINVTTGEEQQVSLESVDVYFQDVFGTMWCHHAEMQNPVYLIPETVPYIKWDNCNSTNITAVVRAQGLDVTLPLSLPTSAQDSNFSVKTEMLGNEIDIECIMEDGEISQVLPGDNKFNITCSGYESHVPSGGILTSTSPVATPIPGTGYAYSLRLTPRPVSRFLGNNSILYVFYSGNGPKASGGDYCIQSNIVFSDEIPASQDMPTNTTDITYVGDNATYSVPMVTSEDANSPNVTVTAFWAWPNNTETDFKCKWTLTSGTPSGCENISGAFASNRTFDITVSGLGTAPKTLIITRTATNAATTTHKVIFSKAPESTTTSPTLNTTGFADPNTTTGLPSSTHVPTNLTAPASTGPTVSTADVTSPTPAGTTSGASPVTPSPSPWDNGTESKAPDMTSSTSPVTTPTPNATSPTPAVTTPTPNATSPTPAVTTPTPNATSPTLGKTSPTSAVTTPTPNATGPTVGETSPQANATNHTLGGTSPTPVVTSQPKNATSAVTTGQHNITSSSTSSMSLRPSSNPETLSPSTSDNSTSHMPLLTSAHPTGGENITQVTPASISTHHVSTSSPAPRPGTTSQASGPGNSSTSTKPGEVNVTKGTPPQNATSPQAPSGQKTAVPTVTSTGGKANSTTGGKHTTGHGARTSTEPTTDYGGDSTTPRPRYNATTYLPPSTSSKLRPRWTFTSPPVTTAQATVPVPPTSQPRFSNLSMLVLQWASLAVLTLLLLLVMADCAFRRNLSTSHTYTTPPYDDAETYV

SEQ ID NO: 71 - RNA, 669 nt, Artificial Sequence; identical to SEQ ID NO: 33
  Synthetic Polynucleotide

SEQ ID NO: 72 - RNA, 2832 nt, Artificial Sequence; identical to SEQ ID NO: 42
  Synthetic Polynucleotide

SEQ ID NO: 73 - RNA, 726 nt, Artificial Sequence; identical to SEQ ID NO: 41
  Synthetic Polynucleotide

SEQ ID NO: 74 - RNA, 1158 nt, Artificial Sequence; identical to SEQ ID NO: 39
  Synthetic Polynucleotide

SEQ ID NO: 75 - RNA, 1491 nt, Artificial Sequence; identical to SEQ ID NO: 40
  Synthetic Polynucleotide

SEQ ID NO: 76 - RNA, 1491 nt, Artificial Sequence; identical to SEQ ID NO: 40
  Synthetic Polynucleotide

SEQ ID NO: 77 - RNA, 2595 nt, Artificial Sequence
  Synthetic Polynucleotide
auggaagccgcucuucuggucugccaguauacaauccagucgcugauucaucucaccggcgaggauccagguuucuuuaacguggagauuccagaauucccuuucuauccaacuuguaacguguguacugccgacguuaacguuacuauuaacuuugacgugggcggaaagaagcaccagcuggaucuugauuucggccagcuaacaccucauaccaaggccgucuaccaaccacgcggggcauuuggcgguucugagaaugcuacaaaccuguuccuuuuggaacuccucggagcaggggaacuggcacuuacaaugaggaguaagaagcugcccaucaacgucaccacgggugaagaacagcaggugucccuggaguccguugauguguauuuccaggacguuuucgggacaauguggugucaucaugccgaaaugcagaauccgguguaucucauuccugagaccgugcccuauauuaaaugggauaacuguaauucgacaaacauaacugccguagugcgugcccagggucuggauguaacuuugccucucucccuucccacuucugcccaggacuccaauuucucagugaagaccgaaaugcuugggaacgagaucgacaucgaguguaucauggaggauggggagaucagucagguguugccuggugacaauaaguuuaauauaacauguuccggcuaugaaucacauguuccaagcggagguauucucacaaguacaucucccguagccacgccgauuccgggaaccggauacgccuauucacuucggcugacuccucggccagugucacgauuccugggcaauaacucaauucuguacgucuuuuacagcggcaacggcccaaaggccaguggaggcgauuacuguauccagucuaacaucguauuuucagaugagauuccagcaagccaagacaugccaacuaauacuacagacauuacauacgucggugauaacgccacuuauucagucccuauggucacauccgaggacgcgaacucacccaauguuaccguuaccgcauucugggcauggcccaauaauacggaaacagacuucaaauguaaguggacccugaccaguggcaccccuucuggcugcgagaauauaagcggggcauuugcuagcaacagaacauucgauauuacugugucuggccuggggaccgcgcccaagacacucauuauaacgcgaacagcuacgaacgcuaccacaaccacacauaaagugauuuucagcaaggcuccagaaucaacuacaaccaguccgacccuuaauaccacaggcuucgcagacccgaacacaacgacgggacugcccuccucaacgcaugugccgacuaaucugacugcucccgcaaguaccggcccaacagucuccacagcagacgucaccucuccgacucccgccggcacuacaucuggagccucaccggugacuccuaguccuucgcccugggacaaugggaccgagucuaaagccccggacaugacgaguucuaccucaccaguuacaaccccaacaccuaaugccacaagcccuacgccagccgugaccaccccuacgcccaaugccaccagcccaacacccgcuguuacaacgccaacgcccaacgcuacuucuccaacgcuaggaaagacaucacccaccucagcuguaaccacgcccacaccaaacgcuaccgggccaaccguuggcgaaaccucgccccaggccaaugcgacaaaccacacccuuggcgggacuucucccacuccuguggugacuucacaaccgaagaacgcgacgucggccguuacgaccgggcagcacaauaucaccucguccuccacgucguccauguccuugcggccuuccaguaacccagagacacugucuccuaguaccagugacaacagcaccucucacaugccauuacugacuuccgcccacccaaccggcggagagaacaucacucaggugacgcccgcaucuauuucuacccaccacgugagcacuagcagcccggcaccaagaccagggaccaccucccaggcuagcggcccgggcaacuccuccacuagcacgaaaccaggagaggugaacgugaccaagggcacaccgccacagaaugcaacuuccccacaggcgcccuccggccagaagacugcuguaccuacggucacuagcacuggcggaaaggcgaauucaaccaccggugguaagcauaccaccggacacggcgcucggacuagcacagagccaaccacugauuacggaggugacucaacgaccccgaggcccagguacaacgcaaccaccuaucucccaccauccacaucuuccaagcucaggccucguuggacuuucaccuccccgccugugacuacagcgcaggccacagugccagugccuccaacgucacagccgcgguuuagcaaucucuccaugcugguccugcagugggcaucucuggcaguccugacacugcuucuuuugcucgugauggccgauugugcguuuagacgcaaccuuucaacaucccacacauauacaacuccacccuaugaugacgcagagacuuaugug

SEQ ID NO: 78 - protein, 865 aa, Artificial Sequence; identical to SEQ ID NO: 28
  Synthetic Polypeptide

SEQ ID NO: 79 - RNA, 2118 nt, Artificial Sequence; identical to SEQ ID NO: 37
  Synthetic Polynucleotide

SEQ ID NO: 80 - RNA, 411 nt, Artificial Sequence; identical to SEQ ID NO: 35
  Synthetic Polynucleotide

SEQ ID NO: 81 - RNA, 2595 nt, Artificial Sequence
  Synthetic Polynucleotide
auggaggcagcacugcuggucugccaguauacaauccagucgcucauucaucugacaggcgaggaccccggcuucuuuaacguggaaaucccagaguucccuuucuauccaaccuguaacguuugcacugcugacgugaacgugacaaucaauuucgacgugggaggaaagaagcaucagcuugaucuggauuucggccaacugacgccacacaccaaagcgguguaccaaccaaggggugcauuuggagggagcgagaaugcuacaaaucuguucuuacuggaacugcuuggugcaggagagcuggcacuaaccaugcgaagcaagaagcuccccaucaacguuaccaccggggaagaacagcaagucagccuugaauccguggauguguacuuucaggauguuuucggcaccauguggugucaccacgcugagaugcagaaucccguguaucucauacccgagacuguacccuacaucaagugggauaauugcaauucaacuaauauuacggcuguggugagggcccagggcuuggacgugacucugcccuuaucucuaccuacuucugcccaagacuccaauuucucugucaagaccgagaugcucgggaaugagaucgauaucgagugcaucauggaggacggugagauaagccagguucugcccggcgacaacaaguucaauaucacuuguucuggcuacgagucccaugugccuagugguggcauacucacaaguacuucucccguagccacgcccauucccggaaccggauacgccuacagucugcgucugaccccacggccuguguccagauuccuggguaacaauaguaucuuauacguguuuuauagcggaaacggcccuaaagcguccggaggggacuauuguauucagaguaauaucguuuucucugaugagauuccugccagucaggacaugccgacaaacacaacugauauuaccuacgugggcgacaaugccacguauucagugcccauggucacgagcgaggacgccaauucaccaaauguuacuguaacagcuuucugggccuggccaaauaacacugagacugacuucaaauguaaguggacuuugaccucuggaacuccgucggguugcgagaauaucagcggggccuuugcuuccaacaggacuuucgacaucacugucucagggcuggggacagcaccgaagacauuaaucauaacacggaccgccaccaacgccacgacuacaacccauaaggugaucuuuuccaaggcaccugaguccaccacuaccuccccgacucuuaacacuacgggcuucgcugaucccaacaccacuacgggguugccuagcucgacacaugugccgacgaaccugacugccccugcaucgaccgggcccacaguuucgaccgccgaugugacaucaccaacgcccgcagguacaaccucaggcgccagcccagugaccccuuccccaagccccugggauaauggaacggaguccaaggcuccugauaugacuuccucuaccagccccgugacuacacccacucccaacgcaacuagcccaaccccagcugugacgacgcccaccccgaacgcgacaucucccacaccugcugugacaaccccaaccccuaacgccacuagcccuacccuagguaagaccaguccgacuagcgccguuacaaccccuaccccuaacgcaaccggcccgaccgugggcgagacuuccccgcaagccaaugcgacaaaucacacauugggcgggaccucuccuacaccagucguuacaucucagccuaagaacgcuaccuccgcugucacuaccggacagcacaacaucaccagcucaagcacgaguuccaugagcuugcggccgagcucaaaucccgagacccuaucaccauccacaucagacaacaguacuucacacaugccacucuugacgagcgcucaccccaccggcggcgagaacaucacccaggugacuccggcgucuauuuccacccaccacgucagcacgucgucucccgcaccgagaccagggacgacuucucaggccagugggccuggcaacuccucuacaagcacaaagccaggcgaaguuaacgugacaaagggaacgccuccccagaacgcaaccaguccucaggcgcccagcgggcagaagacugcggugccaacugugaccagcaccgguggcaaggccaacucaacaacuggaggcaagcauacgacggggcacggcgcccggaccuccacugaacccacgaccgauuacggaggugacagcacaacaccgcggccacgauauaaugccaccacuuaucugccaccauccacaagcuccaagcugcggccacgguggaccuucacaagcccacccgugacgacugcccaagcgacggugccagugccaccuacaagccagccacgcuucuccaaccuuaguaugcucguucuccagugggccagccuugcuguucugacccuccuccugcugcucgugauggccgauugcgccuuuaggagaaaccucagcacuagccacacguacaccacgccgcccuacgaugacgccgagacuuacguc

SEQ ID NO: 82 - RNA, 1029 nt, Artificial Sequence
  Synthetic Polynucleotide
augagugacuggacaggaggagcccuccuuguccucuauuccuuugcucucaugcuuauaauuaucauccugauaaucuuuaucuucagacgggaccuucucuguccacuuggagcccuuuguauacuccuauugaugaucacccuccuccucaucgcucucuggaauuugcacggacaggcauuguuccuuggaauugugcuguucaucuucgggugcuuacuugucuuagguaucuggaucuacuuauuggagaugcucuggcgacuuggugccaccaucuggcagcuuuuggccuucuuccuagcguucuuccucgaccucauucuacucauuauugcucucuaucuacaacagaacugguggacucuauugguugaucuccuuuggcuccuccuguuucuggcgauuuuaaucuggauguauuaccauggacaacgacacagugaugaacaccaccacgaugacucccucccgcacccucaacaagcuaccgaugauucuggccaugaaucugacucuaacuccaacgagggcagacaccaccugcucgugaguggagccggcgacggaccaccacucugcucucagaaccuaggcgcaccuggaggugguccugacaauggcccacaggacccugacaacacggaugauaacgguccacaagacccagauaacacugacgacaauggaccgcaugacccgcugccucaggauccugauaacacagacgacaacggcccacaagauccggacaauaccgacgauaacggaccgcacgacccguuaccucauagcccuagcgacucugcuggaaaugauggaggcccuccacaauugacggaagagguugagaacaaaggaggugaccagggcccgccuuugaugacagacggaggcggcggucauagucaugauuccggccauggcggaggagauccacaccuuccuacgcugcuguuggguucuucugguuccgguggagaugaugacgacccgcacggcccaguucagcuaagcuacuaugac

SEQ ID NO: 83 - protein, 343 aa, Artificial Sequence
  Synthetic Polypeptide
MSDWTGGALLVLYSFALMLIIIILIIFIFRRDLLCPLGALCILLLMITLLLIALWNLHGQALFLGIVLFIFGCLLVLGIWIYLLEMLWRLGATIWQLLAFFLAFFLDLILLIIALYLQQNWWTLLVDLLWLLLFLAILIWMYYHGQRHSDEHHHDDSLPHPQQATDDSGHESDSNSNEGRHHLLVSGAGDGPPLCSQNLGAPGGGPDNGPQDPDNTDDNGPQDPDNTDDNGPHDPLPQDPDNTDDNGPQDPDNTDDNGPHDPLPHSPSDSAGNDGGPPQLTEEVENKGGDQGPPLMTDGGGGHSHDSGHGGGDPHLPTLLLGSSGSGGDDDDPHGPVQLSYYD

SEQ ID NO: 84 - RNA, 2118 nt, Artificial Sequence; identical to SEQ ID NO: 37
  Synthetic Polynucleotide

SEQ ID NO: 85 - RNA, 411 nt, Artificial Sequence; identical to SEQ ID NO: 35
  Synthetic Polynucleotide

SEQ ID NO: 86 - RNA, 669 nt, Artificial Sequence; identical to SEQ ID NO: 33
  Synthetic Polynucleotide

SEQ ID NO: 87 - RNA, 1881 nt, Artificial Sequence
  Synthetic Polynucleotide
auggacagcaagggcagcagccagaagggaagcagguuguuauugcuuuuaguggugagcaacuuacucuuaccccagggcgugguggaggcagcacuccucgucugccaguauacaauccagucgcucauucauuugacaggcgaggaccccggcuucuuuaacguggaaaucccagaguucccuuucuauccaaccuguaacguuugcacagccgacgugaacgugacaaucaauuucgacgugggaggaaagaagcaucagcuugaucuggauuucggccaacugacgccacacaccaaagcgguguaccaaccaaggggugcauuuggagggagcgagaaugcuacaaaucuguucuuacuggaacugcuuggugcaggagagcuggcacuaaccaugcgaagcaagaagcuccccaucaacguuaccaccggggaagaacagcaagucagccuugaauccguggauguguacuuucaggauguuuucggcaccauguggugucaccacgcugagaugcagaaucccguguaucucauacccgagacuguacccuacaucaagugggauaauugcaauucaacuaauauuacggcuguggugagggcccagggcuuggacgugacucugcccuuaucucuaccuacuucugcccaagacuccaauuucucugucaagaccgagaugcucgggaaugagaucgauaucgagugcaucauggaggacggugagauaagccagguucugcccggcgacaacaaguucaauaucacuuguucuggcuacgagucccaugugccuagugguggcauacucacaaguacuucucccguagccacgcccauucccggaaccggauacgccuacagucugcgucugaccccacggccuguguccagauuccuggguaacaauaguaucuuauacguguuuuauagcggaaacggcccuaaagcguccggaggggacuauuguauucagaguaauaucguuuucucugaugagaucccugccagucaggacaugccgacaaacacaacugauauuaccuacgugggcgacaaugccacguauucagugcccauggucacgagcgaggacgccaauucaccaaauguuacuguaacagcuuucugggccuggccaaauaacacugagacugacuucaaauguaaguggacuuugaccucuggaacuccgucggguugcgagaauaucagcggggccuuugcuuccaacaggacuuucgacaucacugucucagggcuggggacagcaccgaagacauuaaucauaacacggaccgccaccaacgccacgacuacaacccauaaggugaucuuuuccaaggcaccuggcagcggcagcgcaggcucugcaagcggcggcgccuccagcggcuccggaggugccagcaugcagaucuacgagggcaagcugaccgccgagggccugagguucggcaucguggccagcagguucaaccacgcccugguggacaggcugguggaaggcgccaucgacgccaucgugaggcacggcggcagggaggaggacaucacccuggugcgggugcccggcagcugggagauccccguggccgccggcgagcuggccaggaaggaagauauugaugcagugaucgccaucggcgugcugaucaggggcgccaccccacacuucgacuacaucgccagcgaagugagcaagggacuggcggaccugagccuggagcugaggaagcccaucaccuucggcgugaucaccgccgacacccuggagcaggccaucgagagggccggcaccaagcacggcaacaagggaugggaggccgcccugagcgcuaucgaaauggccaaccucuucaagagccugagg

SEQ ID NO: 88 - protein, 627 aa, Artificial Sequence
  Synthetic Polypeptide
MDSKGSSQKGSRLLLLLVVSNLLLPQGVVEAALLVCQYTIQSLIHLTGEDPGFFNVEIPEFPFYPTCNVCTADVNVTINFDVGGKKHQLDLDFGQLTPHTKAVYQPRGAFGGSENATNLFLLELLGAGELALTMRSKKLPINVTTGEEQQVSLESVDVYFQDVFGTMWCHHAEMQNPVYLIPETVPYIKWDNCNSTNITAVVRAQGLDVTLPLSLPTSAQDSNFSVKTEMLGNEIDIECIMEDGEISQVLPGDNKFNITCSGYESHVPSGGILTSTSPVATPIPGTGYAYSLRLTPRPVSRFLGNNSILYVFYSGNGPKASGGDYCIQSNIVFSDEIPASQDMPTNTTDITYVGDNATYSVPMVTSEDANSPNVTVTAFWAWPNNTETDFKCKWTLTSGTPSGCENISGAFASNRTFDITVSGLGTAPKTLIITRTATNATTTTHKVIFSKAPGSGSAGSASGGASSGSGGASMQIYEGKLTAEGLRFGIVASRFNHALVDRLVEGAIDAIVRHGGREEDITLVRVPGSWEIPVAAGELARKEDIDAVIAIGVLIRGATPHFDYIASEVSKGLADLSLELRKPITFGVITADTLEQAIERAGTKHGNKGWEAALSAIEMANLFKSLR

SEQ ID NO: 89 - RNA, 2097 nt, Artificial Sequence
  Synthetic Polynucleotide
auggacagcaagggcagcagccagaagggcaguaggcuccuuuugcuacuuguggugagcaaccucuuguuaccccagggcgugguggaggcagcacuccucgucugccaguauacaauccagucgcucauucauuugacaggcgaggaccccggcuucuuuaacguggaaaucccagaguucccuuucuauccaaccuguaacguuugcacggcagacgugaacgugacaaucaauuucgacgugggaggaaagaagcaucagcuugaucuggauuucggccaacugacgccacacaccaaagcgguguaccaaccaaggggugcauuuggagggagcgagaaugcuacaaaucuguucuuacuggaacugcuuggugcaggagagcuggcacuaaccaugcgaagcaagaagcuccccaucaacguuaccaccggggaagaacagcaagucagccuugaauccguggauguguacuuucaggauguuuucggcaccauguggugucaccacgcugagaugcagaaucccguguaucucauacccgagacuguacccuacaucaagugggauaauugcaauucaacuaauauuacggcuguagugagggcccagggcuuggacgugacucugcccuuaucucuaccuacuucugcccaagacuccaauuucucugucaagaccgagaugcucgggaaugagaucgauaucgagugcaucauggaggacggugagauaagccagguucugcccggcgacaacaaguucaauaucacuuguucuggcuacgagucccaugugccuagugguggcauacucacaaguacuucucccguagccacgcccauucccggaaccggauacgccuacagucugcgucugaccccacggccuguguccagauuccuggguaacaauaguaucuuauacguguuuuauagcggaaacggcccuaaagcguccggaggggacuauuguauucagaguaauaucguuuucucugaugagauuccagccagucaggacaugccgacaaacacaacugauauuaccuacgugggcgacaaugccacguauucagugcccauggucacgagcgaggacgccaauucaccaaauguuacuguaacagcuuucugggccuggccaaauaacacugagacugacuucaaauguaaguggacuuugaccucuggaacuccgucggguugcgagaauaucagcggggccuuugcuuccaacaggacuuucgacaucacugucucagggcuggggacagcaccgaagacauuaaucauaacacggaccgccaccaacgccacgacuacaacccauaaggugaucuuuuccaaggcaccuggcagcggcagcgcuggcuccgcuagcggcggcgccucuagcggaucaggaggcgcauccauggagaacauugcaucuggccugcugggaccucuacuggugcugcaggccggauucuuccugcugaccaagauccugaccaucccucagagccuggacagcugguggaccagccugaacuuccugggcggcaccccagugugccugggccagaacagccagagccagaucuccucccacagccccaccugcuguccgcccaucugccccggcuaccguuggaugugccugaggagguucaucaucuuccugugcauacuccuguugugucuaauuuuccugcucguucugcucgacuaccagggcaugcugccgguguguccucugauccccggcuccuccaccaccagcaccggccccugcaggaccugcaccacaccagcacaagguaccagcauguuccccagcuguugcuguaccaagcccaccgacggcaacugcaccugcauccccauccccagcagcugggccuucgccaaguaccugugggagugggccagcgugagguucagcuggcugucacuucuugcgccauucgugcagugguucgugggccugagcccuacuguguggcugucgguaaucuggaugaugugguucuggggccccagccuguacaacauccugucaccguucaugccucuccuaccgcuguucuucugccuguggguguacauc

SEQ ID NO: 90 - protein, 699 aa, Artificial Sequence
  Synthetic Polypeptide
MDSKGSSQKGSRLLLLLVVSNLLLPQGVVEAALLVCQYTIQSLIHLTGEDPGFFNVEIPEFPFYPTCNVCTADVNVTINFDVGGKKHQLDLDFGQLTPHTKAVYQPRGAFGGSENATNLFLLELLGAGELALTMRSKKLPINVTTGEEQQVSLESVDVYFQDVFGTMWCHHAEMQNPVYLIPETVPYIKWDNCNSTNITAVVRAQGLDVTLPLSLPTSAQDSNFSVKTEMLGNEIDIECIMEDGEISQVLPGDNKFNITCSGYESHVPSGGILTSTSPVATPIPGTGYAYSLRLTPRPVSRFLGNNSILYVFYSGNGPKASGGDYCIQSNIVFSDEIPASQDMPTNTTDITYVGDNATYSVPMVTSEDANSPNVTVTAFWAWPNNTETDFKCKWTLTSGTPSGCENISGAFASNRTFDITVSGLGTAPKTLIITRTATNATTTTHKVIFSKAPGSGSAGSASGGASSGSGGASMENIASGLLGPLLVLQAGFFLLTKILTIPQSLDSWWTSLNFLGGTPVCLGQNSQSQISSHSPTCCPPICPGYRWMCLRRFIIFLCILLLCLIFLLVLLDYQGMLPVCPLIPGSSTTSTGPCRTCTTPAQGTSMFPSCCCTKPTDGNCTCIPIPSSWAFAKYLWEWASVRFSWLSLLAPFVQWFVGLSPTVWLSVIWMMWFWGPSLYNILSPFMPLLPLFFCLWVYI

SEQ ID NO: 91 - RNA, 2403 nt, Artificial Sequence
  Synthetic Polynucleotide
auggacagcaagggcagcagccagaagggauccaggcuauuguuacuauuaguggugagcaaccuccucuugccccagggcgugguggacaucgaccccuacaaggaguucggcgccaccguggaguuguuaagcuuccuccccagcgacuucuuccccagcgugagggaccugcuggacaccgccgccgcccuguacagggaggcccuggagagccccgagcacugcucgccucaccacaccgcccugaggcaggccauccugugcuggggcgagcugaugacccuggccaccugggugggcaacaaccuggaggaccccgccagccgcgaccucguugugaacuacgugaacaccaacaugggccugaagaucaggcagcugcugugguuccacaucagcugccugaccuucggcagggagacagugcuggaguaccuggugagcuucggcguguggaucaggacuccacccgccuacaggccucccaacgcgccaauccugagcacccugcccgagacaacaguggugggcagcggcagcgcagguuccgccagcggcggcgcauccaguggcucuggaggagcuucugacauugacccauauaaggaauucggugcuacaguagagcuacugucuuucuugccuagugauuucuucccgaguguaagggaucuccuagauacagccgcugcucuauauagagaggcacuggaaucuccagagcacuguuccccacaccauaccgcucuccggcaggcaauccuguguuggggugaacuuaugacacuggcaaccugggucgguaacaacggaucaggugaggcggcucugcuggucugccaguauacaauccagucgcucauucaucugacaggcgaagauccagguuucuuuaacguggaaaucccagaguucccuuucuauccaaccuguaacguuuguacagcugacgugaacgugacaaucaauuucgacgugggaggaaagaagcaucagcuugaucuggauuucggccaacugacgccacacaccaaagcgguguaccaaccaaggggugcauuuggagggagcgagaaugcuacaaaucuguucuuacuggaacugcuuggugcaggagagcuggcacuaaccaugcgaagcaagaagcuccccaucaacguuaccaccggggaagaacagcaagucagccuugaauccguggauguguacuuucaggauguuuucggcaccauguggugucaccacgcugagaugcagaaucccguguaucucauacccgagacuguacccuacaucaagugggauaauugcaauucaacuaauauuacggcuguggugagggcccagggcuuggacgugacucugcccuuaucucuaccuacuucugcccaagacuccaauuucucugucaagaccgagaugcucgggaaugagaucgauaucgagugcaucauggaggacggugagauaagccagguucugcccggcgacaacaaguucaauaucacuuguucuggcuacgagucccaugugccuucugguggcauacucacaaguacuucucccguagccacgcccauucccggaaccggauaugcguauagucugcgucugaccccacggccuguguccagauuccuggguaacaauaguaucuuauacguguuuuauagcggaaacggcccuaaagcguccggaggggacuauuguauucagaguaauaucguuuucucugaugaaauuccugccagucaggacaugccgacaaacacaacugauauuaccuacgugggcgacaaugccacguauucagugcccauggucacgagcgaggacgccaauucaccaaauguuacuguaacagcuuucugggccuggccaaauaacacugagacugacuucaaauguaaguggacuuugaccucuggaacuccgucggguugcgagaauaucagcggggccuuugcuuccaacaggacuuucgacaucacugucucagggcuggggacagcaccgaagacauuaaucauaacacggaccgccaccaacgccacgacuacaacccauaaggugaucuuuuccaaggcaccuggauccggacugguggucaacuaugugaauacaaauaugggccucaagauuaggcagcuccuaugguuccauauuuccugcuuaacuuucgguagggaaacuguccuggaauaucucguuagcuucggaguguggauucggacuccuccugccuacagaccaccuaacgcuccaauucugucaacucucccagagacgacuguggucagaaggaggggcaggagccccagacggcggacaccaagcccucgccgaagaagaagccaaagcccgcggcgccggagaucucaguccagagagagccagugc

SEQ ID NO: 92 - protein, 801 aa, Artificial Sequence
  Synthetic Polypeptide
MDSKGSSQKGSRLLLLLVVSNLLLPQGVVDIDPYKEFGATVELLSFLPSDFFPSVRDLLDTAAALYREALESPEHCSPHHTALRQAILCWGELMTLATWVGNNLEDPASRDLVVNYVNTNMGLKIRQLLWFHISCLTFGRETVLEYLVSFGVWIRTPPAYRPPNAPILSTLPETTVVGSGSAGSASGGASSGSGGASDIDPYKEFGATVELLSFLPSDFFPSVRDLLDTAAALYREALESPEHCSPHHTALRQAILCWGELMTLATWVGNNGSGEAALLVCQYTIQSLIHLTGEDPGFFNVEIPEFPFYPTCNVCTADVNVTINFDVGGKKHQLDLDFGQLTPHTKAVYQPRGAFGGSENATNLFLLELLGAGELALTMRSKKLPINVTTGEEQQVSLESVDVYFQDVFGTMWCHHAEMQNPVYLIPETVPYIKWDNCNSTNITAVVRAQGLDVTLPLSLPTSAQDSNFSVKTEMLGNEIDIECIMEDGEISQVLPGDNKFNITCSGYESHVPSGGILTSTSPVATPIPGTGYAYSLRLTPRPVSRFLGNNSILYVFYSGNGPKASGGDYCIQSNIVFSDEIPASQDMPTNTTDITYVGDNATYSVPMVTSEDANSPNVTVTAFWAWPNNTETDFKCKWTLTSGTPSGCENISGAFASNRTFDITVSGLGTAPKTLIITRTATNATTTTHKVIFSKAPGSGLVVNYVNTNMGLKIRQLLWFHISCLTFGRETVLEYLVSFGVWIRTPPAYRPPNAPILSTLPETTVVRRRGRSPRRRTPSPRRRRSQSPRRRRSQSRESQC

SEQ ID NO: 93 - RNA, 2538 nt, Artificial Sequence
  Synthetic Polynucleotide
auggacagcaagggcagcagccagaaggguagcaggcuacucuugcuccuaguggugagcaacuugcuucuuccccagggcgugguggaggcagcauugcuugucugccaguauacaauccagucgcucauucaucuaacaggcgaggaccccggcuucuuuaacguggaaaucccagaguucccuuucuauccaaccuguaacguuugcacugccgacgugaacgugacaaucaauuucgacgugggaggaaagaagcaucagcuugaucuggauuucggccaacugacgccacacaccaaagcgguguaccaaccaaggggugcauuuggagggagcgagaaugcuacaaaucuguucuuacuggaacugcuuggugcaggagagcuggcacuaaccaugcgaagcaagaagcuccccaucaacguuaccaccggggaagaacagcaagucagccuugaauccguggauguguacuuucaggauguuuucggcaccauguggugucaccacgcugagaugcagaaucccguguaucucauacccgagacuguacccuacaucaagugggauaauugcaauucaacuaauauuacggcuguggugagggcccagggcuuggacgugacucugcccuuaucucuaccuacuucugcccaagacuccaauuucucugucaagaccgagaugcucgggaaugagaucgauaucgagugcaucauggaggacggugagauaagccagguucugcccggcgacaacaaguucaauaucacuuguucuggcuacgagucccaugugccuuccggcggcauacucacaaguacuucucccguagccacgcccauucccggaaccggauacgccuacagucugcgucugaccccacggccuguguccagauuccuggguaacaauaguaucuuauacguguuuuauagcggaaacggcccuaaagcguccggaggggacuauuguauucagaguaauaucguuuucucugaugagauuccagccagucaggacaugccgacaaacacaacugauauuaccuacgugggcgacaaugccacguauucagugcccauggucacgagcgaggacgccaauucaccaaauguuacuguaacagcuuucugggccuggccaaauaacacugagacugacuucaaauguaaguggacuuugaccucuggaacuccgucggguugcgagaauaucagcggggccuuugcuuccaacaggacuuucgacaucacugucucagggcuggggacagcaccgaagacauuaaucauaacacggaccgccaccaacgccacgacuacaacccauaaggugaucuuuuccaaggcaccugaguccaccacuaccuccccgacucuuaacacuacgggcuucgcugaucccaauacuacuacuggguugccuagcucgacacaugugccgacgaaccugacugccccugcaucgaccgggcccacaguuucgaccgccgaugugacaagcccuacgcccgcagguacaaccucaggcgccagcccagugaccccuuccccaagccccugggacaacggaacggaguccaaggcuccugauaugacuuccucuaccagccccgugacuacacccacucccaacgcaacuagcccaaccccagcugugacgacgcccaccccgaacgcgacaucucccacaccugcugugacaaccccuaccccuaacgccacuagcccuacccuagguaagaccaguccgacuagcgccguuacuacaccgaccccuaaugcaaccggcccgacugucggcgagacuuccccgcaagccaaugcgacaaaucacacauugggcgggaccucuccuacaccagucguuacaucucagccuaagaacgcuaccuccgcugucacuaccggccagcacaacaucacaagcucaagcacgaguuccaugagcuugcggccgagcucaaaucccgagacacuaucaccauccacaucagacaacaguacuucacacaugccacucuugacgagcgcucaccccaccggcggcgagaacauuacccaggugacuccggcgucuauuuccacccaccacgucagcacgucgucucccgcaccacggccagggacgacuucucaggccagcggcccaggaaacuccucuacaagcacaaagccaggcgaaguuaacgucaccaagggaacgccuccccagaacgcaaccuccccacaggcucccagcgggcagaagacugcggugccaacugugaccagcaccgguggcaaggccaacucaacaacuggaggcaagcauacgacggggcacggcgcccggaccuccacugaacccacgaccgauuacggaggugauaguaccaccccgcggccacgauauaaugccaccacuuaucugccaccuagcacuuccuccaagcuccggccacgguggaccuucacaagcccacccgugacgacagcccaggcgacggugccagucccaccuacaagccagccacgcuucuccaaccuuagu

SEQ ID NO: 94 - protein, 846 aa, Artificial Sequence
  Synthetic Polypeptide
MDSKGSSQKGSRLLLLLVVSNLLLPQGVVEAALLVCQYTIQSLIHLTGEDPGFFNVEIPEFPFYPTCNVCTADVNVTINFDVGGKKHQLDLDFGQLTPHTKAVYQPRGAFGGSENATNLFLLELLGAGELALTMRSKKLPINVTTGEEQQVSLESVDVYFQDVFGTMWCHHAEMQNPVYLIPETVPYIKWDNCNSTNITAVVRAQGLDVTLPLSLPTSAQDSNFSVKTEMLGNEIDIECIMEDGEISQVLPGDNKFNITCSGYESHVPSGGILTSTSPVATPIPGTGYAYSLRLTPRPVSRFLGNNSILYVFYSGNGPKASGGDYCIQSNIVFSDEIPASQDMPTNTTDITYVGDNATYSVPMVTSEDANSPNVTVTAFWAWPNNTETDFKCKWTLTSGTPSGCENISGAFASNRTFDITVSGLGTAPKTLIITRTATNATTTTHKVIFSKAPESTTTSPTLNTTGFADPNTTTGLPSSTHVPTNLTAPASTGPTVSTADVTSPTPAGTTSGASPVTPSPSPWDNGTESKAPDMTSSTSPVTTPTPNATSPTPAVTTPTPNATSPTPAVTTPTPNATSPTLGKTSPTSAVTTPTPNATGPTVGETSPQANATNHTLGGTSPTPVVTSQPKNATSAVTTGQHNITSSSTSSMSLRPSSNPETLSPSTSDNSTSHMPLLTSAHPTGGENITQVTPASISTHHVSTSSPAPRPGTTSQASGPGNSSTSTKPGEVNVTKGTPPQNATSPQAPSGQKTAVPTVTSTGGKANSTTGGKHTTGHGARTSTEPTTDYGGDSTTPRPRYNATTYLPPSTSSKLRPRWTFTSPPVTTAQATVPVPPTSQPRFSNLS

SEQ ID NO: 95 - RNA, 3057 nt, Artificial Sequence
  Synthetic Polynucleotide
auggacucgaagggaucuagucagaaaggcucuaggcuccuacuccucuugguggugagcaacuuacuccuuccccagggcguggugagagcagugggcguuuucuuagcaaucugccucgugacaaucuuuguguugccgaccuggggcaacugggccuaccccugcugccacgugacccagcugagagcucaacaccugcuugcccuggagaacaucagcgacaucuaccuuguaagcaaccagacaugcgacggcuucagucuggccagccugaacagccccaagaacggcucaaaccagcuagugaucagccggugcgcuaacggucugaacguugugagcuucuucaucagcaucuugaagagaaguaguagcgcgcugaccggccaccugagagagcugcugaccacucucgagacacucuauggcagcuucagcguggaggaccuguucggcgcaaaccugaaccgcuacgccuggcacagaggcggcggaagcgguagcgcuggcagcgccagcggaggcgcuucauccggauccggcggcgcaagcagccuuucugaggugaagcuccacuuggacaucgaaggccacgccagccauuacaccauaccauggaccgagcugauggcaaaggugcccggccuuagcccagaagcccuguggcgagaggccaacguuaccgaagacuuggcuaguauguuaaacagguacaaacuuaucuacaagacuagcggcacccugggcaucgcauuagccgagcccguggacauccccgccguuagcgagggcagcaugcagguggacgccagcaagguucacccugguguaauuaguggccucaacagcccagccuguauguugagcgccccacuggagaagcagcuguuuuacuauaucgggaccauguugcccaauacccggccacacaguuacguguucuaccagcugcggugucaccugagcuacguggcccugucuaucaacggcgacaaguuccaguacaccggcgccaugaccagcaaguuccugaugggcaccuacaagcgggucaccgagaagggcgacgagcacgugcugucacuuguguucgguaagaccaaggaccugcccgaccuucggggccccuuuucauacccuaguuugaccagcgcccaaaguggcgacuacagccuugugauagugaccaccuucgugcauuacgccaacuuccacaacuacuucgugcccaaccugaaggacauguucagccgggcgguaaccaugacggccgcuucuuaugcccgguaugugcugcagaagcugguccugcuggagaugaagggcgggugccgggagcccgaguuggacaccgaaacccugaccaccauguucgagguuagcguggccuucuucaaggugggucacgcggugggcgaaaccggcaauggaugcguggacuuacgcuggcuggccaagaguuucuuugagcuuaccgugcugaaggauaucaucggcaucugcuacggcgccaccguaaagggaaugcagagcuaugggcuggagagacuugccgccaugcucauggcuaccgugaagauggaggagcugggacaccugacaacagagaagcaggaguacgcccugagacuggccaccgugggcuacccuaaggccggcguguacaguggacucauaggcggagcuaccagcgugcuccuauccgcuuauaacagacaccccuuauuucagccccugcacacagugaugcgggagacuuuauucaucggaucucacgucguacugcgggaguugcggcugaacguaaccacccagggcccuaauuuagcacuuuaucagcugcucaguacugcccugugcagcgcacuugagaucggcgagguacucagaggccuggcccucgguacggagaguggccuguuuucuccaugcuaccuuagccugcgguuugaucugaccagagacaaguugcugagcauggcuccucaagaggcgacccuugaccaggcagccgugucaaacgccguggacggauuccugggcagacugucucuggaacgggaagaccgggaugcuuggcaccuuccugccuauaaguguguggaucggcuggauaagguccugaugauaaucccucugauuaacguuacuuucaucaucucuagcgaucgggagguccgaggguccgcccucuacgaggccagcaccaccuaucugagcagcagccucuucuugucuccugugauuaugaacaagugcagccagggugcaguagccggcgagccccggcagaucccgaagauccagaacuucacucggacccagaagucuuguaucuucugcggcuucgcccuucugaguuacgacgagaaggagggccuggagacuacaacuuacaucacaagccaggaggugcagaacagcauccugucaucuaauuacuuugacuucgacaaccugcacguucauuaucuacugcuaacaacuaacgguaccgucauggaaaucgcaggacuguaugaggagcgggccggcagcgggagcgcgggcucugccagcgguggugccagcagcggcaguggaggugccuccaugcagauuuacgaaggaaagcugaccgccgaaggccugagguucggcaucguggcuuccagauucaaccacgcacugguggacaggcugguggagggcgccaucgacgcaaucgugcgccacggcggcagggaggaggacaucacccucguaagagucccugguagcugggaaauucccguggccgcgggcgagcuggcuaggaaggaggauaucgacgccgucaucgccaucggcguucucauccggggugccacaccacauuucgacuacaucgcaagcgagguuucaaagggacucgccgacuuaagucuggagcugaggaagcccaucaccuuuggcgugaucaccgccgacacccuggagcaggccaucgagcgcgccggcaccaagcacgggaacaagggcugggaggcagccuuaucagccaucgaaauggcgaaucuguucaagagccugcgg

SEQ ID NO: 96 - protein, 1019 aa, Artificial Sequence
  Synthetic Polypeptide
MDSKGSSQKGSRLLLLLVVSNLLLPQGVVRAVGVFLAICLVTIFVLPTWGNWAYPCCHVTQLRAQHLLALENISDIYLVSNQTCDGFSLASLNSPKNGSNQLVISRCANGLNVVSFFISILKRSSSALTGHLRELLTTLETLYGSFSVEDLFGANLNRYAWHRGGGSGSAGSASGGASSGSGGASSLSEVKLHLDIEGHASHYTIPWTELMAKVPGLSPEALWREANVTEDLASMLNRYKLIYKTSGTLGIALAEPVDIPAVSEGSMQVDASKVHPGVISGLNSPACMLSAPLEKQLFYYIGTMLPNTRPHSYVFYQLRCHLSYVALSINGDKFQYTGAMTSKFLMGTYKRVTEKGDEHVLSLVFGKTKDLPDLRGPFSYPSLTSAQSGDYSLVIVTTFVHYANFHNYFVPNLKDMFSRAVTMTAASYARYVLQKLVLLEMKGGCREPELDTETLTTMFEVSVAFFKVGHAVGETGNGCVDLRWLAKSFFELTVLKDIIGICYGATVKGMQSYGLERLAAMLMATVKMEELGHLTTEKQEYALRLATVGYPKAGVYSGLIGGATSVLLSAYNRHPLFQPLHTVMRETLFIGSHVVLRELRLNVTTQGPNLALYQLLSTALCSALEIGEVLRGLALGTESGLFSPCYLSLRFDLTRDKLLSMAPQEATLDQAAVSNAVDGFLGRLSLEREDRDAWHLPAYKCVDRLDKVLMIIPLINVTFIISSDREVRGSALYEASTTYLSSSLFLSPVIMNKCSQGAVAGEPRQIPKIQNFTRTQKSCIFCGFALLSYDEKEGLETTTYITSQEVQNSILSSNYFDFDNLHVHYLLLTTNGTVMEIAGLYEERAGSGSAGSASGGASSGSGGASMQIYEGKLTAEGLRFGIVASRFNHALVDRLVEGAIDAIVRHGGREEDITLVRVPGSWEIPVAAGELARKEDIDAVIAIGVLIRGATPHFDYIASEVSKGLADLSLELRKPITFGVITADTLEQAIERAGTKHGNKGWEAALSAIEMANLFKSLR

SEQ ID NO: 97 - RNA, 2784 nt, Artificial Sequence
  Synthetic Polynucleotide
auggacucuaagggcagcagccagaagggcaguaggcuccuacuucuccucguggugagcaacuuauugcuuccccagggaguggugcagacuccggaacagcccgcuccgcccgcuaccaccguccagccuaccgccacgcgccagcagacuuccuucccguuucgcgucugcgagcucuccucucacggcgaucucuuccgcuucuccuccgauauucagugccccuccuucggcacccgcgagaaccauaccgagggccuccucauggucuuuaaggacaacaucaucccuuacuccuucaagguacgcuccuacacaaagauagucaccaacauccucaucuauaauggaugguacgcugacucuguuaccaaucgccacgaggagaaguucuccguugauuccuacgagacugaccagauggauaccaucuaccagugcuacaaugccgucaagaugaccaaggacggccugacccgcgucuaugucgaccgcgacggcguuaacauaacugucaaccucaagccuacaggcggccuggccaauggcgucagacgcuacgccucccagaccgagcucuacgacgcuccuggcuggcugaucuggaccuaccggacccgcaccacugucaauugccucauuaccgacaugauggccaaguccaauagcccauucgauuucuucguaaccaccaccggccagaccgucgagaugucgccauucuaugacggcaagaauaaggaaacuuuccacgagagagccgauagcuuccacguccgcacgaacuacaagauugucgacuacgacaaucgcggcaccaauccacagggcgagcgccgcgccuuccuggacaagggcaccuacacccucuccuggaaacucgagaacagaaccgccuacuguccccuccagcacuggcagacuuuugauuccaccaucgccacugagacuggcaagaguauccauuucgucaccgacgaaggaacaucuucauucgucacaaauaccacugugggcauugagcuccccgacgccuucaagugcaucgaggaacaggucaacaagacaaugcacgagaaguacgaggccgugcaggaccgguauaccaagggccaggaggccauuacauacuucaucaccagcgguggauugcuucucgccuggcuuccacucacaccucgcagucuggccacaguuaagaaccucacugaguugaccacuccaacaucgucaccaccuucuucaccuagcccuccugcuccuuccgccgcccgcggcuccacuccugccgcugucuuaaggggcucgggcagcgccggcagcgcaucgggaggggcgaguucagggucaggcggugccuccgcaggcaaugcuaccacaccagugccaccaaccgccccuggcaaguccuuagguacccugaacaauccagcgacaguucagauccaguucgcuuacgauucacucaggcgccagaucaaccgcaugcuuggugaccuugcccgggccuggugccucgaacagaagcgccagaacaugguacuuagggaacuuaccaagauuaauccuacuacagucauguccucuaucuacggcaaggccguugcugccaagcgccugggcgacgucaucagcgugucgcagugcgucccagucaaccaggcuaccguuacccucaggaaguccaugagagugccaggcuccgaaacaaugugcuauucccgcccucugguuucauuuuccuucaucaacgacacaaagaccuacgagggccaguuaggaacugacaaugagauauucuugacuaagaagaugacugagguaugccaggcaacuucucaauacuacuuccagucuggaaaugaaauccacguauauaacgacuaucaucacuuuaagacuaucgaacucgacggaauugcuacacuccaaacauucaucucacugaauaccucccuuaucgagaacaucgacuucgcaucccucgagcuguauagcagagacgagcagagagccagcaacguguucgaccuggaggguaucuuucgcgaguacaacuuccaggcacagaauauagccggccuccguaaggaccuggauaacgccguguccaauggccgcaaccaguucgucgacggucuuggcgaacucauggacucucugggauccguggggcaauccaucacaaacuuagucucuacugucgguggacuauucagcagccugguuagcggauuuaucucuuucuuuaagaacccaggcagugguucugccggcucagccagcggcggcgcuaguagcggcagcggaggcgccucaaugcagaucuaugaggguaaguugacagccgaaggcuugagguuuggcaucguagccagccgguucaaccacgcccugguggacaggcugguugagggugccauugacgccauugugaggcacggcggcagggaggaggacauuacccuggucagaguccccggaucaugggagauccccguggccgccggggagcuggccaggaaggaagacaucgacgcugugaucgccaucggcgugcugauccgaggagccacaccccauuucgacuacaucgccagugagguuagcaaaggccuagcggaccugagccuggagcugcgcaagcccaucaccuucggcgucauuacugccgacaccuuggaacaggccaucgaaagggccgguacaaagcacggcaacaagggcugggaggcagcccuuagcgccaucgagauggcaaaccuguuuaaguccuugagg

SEQ ID NO: 98 - protein, 928 aa, Artificial Sequence
  Synthetic Polypeptide
MDSKGSSQKGSRLLLLLVVSNLLLPQGVVQTPEQPAPPATTVQPTATRQQTSFPFRVCELSSHGDLFRFSSDIQCPSFGTRENHTEGLLMVFKDNIIPYSFKVRSYTKIVTNILIYNGWYADSVTNRHEEKFSVDSYETDQMDTIYQCYNAVKMTKDGLTRVYVDRDGVNITVNLKPTGGLANGVRRYASQTELYDAPGWLIWTYRTRTTVNCLITDMMAKSNSPFDFFVTTTGQTVEMSPFYDGKNKETFHERADSFHVRTNYKIVDYDNRGTNPQGERRAFLDKGTYTLSWKLENRTAYCPLQHWQTFDSTIATETGKSIHFVTDEGTSSFVTNTTVGIELPDAFKCIEEQVNKTMHEKYEAVQDRYTKGQEAITYFITSGGLLLAWLPLTPRSLATVKNLTELTTPTSSPPSSPSPPAPSAARGSTPAAVLRGSGSAGSASGGASSGSGGASAGNATTPVPPTAPGKSLGTLNNPATVQIQFAYDSLRRQINRMLGDLARAWCLEQKRQNMVLRELTKINPTTVMSSIYGKAVAAKRLGDVISVSQCVPVNQATVTLRKSMRVPGSETMCYSRPLVSFSFINDTKTYEGQLGTDNEIFLTKKMTEVCQATSQYYFQSGNEIHVYNDYHHFKTIELDGIATLQTFISLNTSLIENIDFASLELYSRDEQRASNVFDLEGIFREYNFQAQNIAGLRKDLDNAVSNGRNQFVDGLGELMDSLGSVGQSITNLVSTVGGLFSSLVSGFISFFKNPGSGSAGSASGGASSGSGGASMQIYEGKLTAEGLRFGIVASRFNHALVDRLVEGAIDAIVRHGGREEDITLVRVPGSWEIPVAAGELARKEDIDAVIAIGVLIRGATPHFDYIASEVSKGLADLSLELRKPITFGVITADTLEQAIERAGTKHGNKGWEAALSAIEMANLFKSLR

SEQ ID NO: 99 - RNA, 2595 nt, Artificial Sequence; identical to SEQ ID NO: 44
  Synthetic Polynucleotide

SEQ ID NO: 100 - RNA, 2595 nt, Artificial Sequence; identical to SEQ ID NO: 54
  Synthetic Polynucleotide

SEQ ID NO: 101 - RNA, 2595 nt, Artificial Sequence; identical to SEQ ID NO: 64
  Synthetic Polynucleotide

SEQ ID NO: 102 - RNA, 2595 nt, Artificial Sequence; identical to SEQ ID NO: 68
  Synthetic Polynucleotide

SEQ ID NO: 103 - RNA, 2595 nt, Artificial Sequence; identical to SEQ ID NO: 69
  Synthetic Polynucleotide

SEQ ID NO: 104 - RNA, 57 nt, Artificial Sequence
  Synthetic Polynucleotide
gggaaauaagagagaaaagaagaguaagaagaaauauaagaccccggcgccgccacc

SEQ ID NO: 105 - RNA, 2118 nt, Artificial Sequence; identical to SEQ ID NO: 37
  Synthetic Polynucleotide

SEQ ID NO: 106 - RNA, 119 nt, Artificial Sequence
  Synthetic Polynucleotide
ugauaauaggcuggagccucgguggccuagcuucuugccccuugggccuccccccagccccuccuccccuuccugcacccguacccccguggucuuugaauaaagucugagugggcggc

SEQ ID NO: 107 - RNA, 411 nt, Artificial Sequence; identical to SEQ ID NO: 35
  Synthetic Polynucleotide

SEQ ID NO: 108 - RNA, 669 nt, Artificial Sequence
  Synthetic Polynucleotide
auggugagcuucaagcaggugagagugccccuguucaccgccaucgcccuggugaucgugcugcugcuggccuacuuccugccacccagagugagaggcggcggcagaguggccgccgccgccaucaccugggugcccaagcccaacguggagguguggcccguggacccgccaccucccgugaacuucaacaagaccgccgagcaggaguacggcgacaaggaggugaagcugccccacuggacgccgacccugcacaccuuccaggugccccagaacuacaccaaggccaacugcaccuacugcaacaccagagaguacaccuucagcuacaagggcugcugcuucuacuucaccaagaagaagcacaccuggaacggcugcuuccaggccugcgccgagcuguaccccugcaccuacuucuacggccccaccccagacauccugcccguggugaccagaaaccugaacgccaucgagagccugugggugggcguguacagagugggcgagggcaacuggaccagccuggacggcggcaccuucaagguguaccagaucuucggcagccacugcaccuacgugagcaaguucagcaccgugcccgugagccaccacgagugcagcuuccugaagcccugccugugcgugagccagagaagcaacagc

SEQ ID NO: 109 - RNA, 2595 nt, Artificial Sequence; identical to SEQ ID NO: 81
  Synthetic Polynucleotide

SEQ ID NO: 110 - RNA, 1881 nt, Artificial Sequence
  Synthetic Polynucleotide
auggacagcaagggcagcagccagaagggaucgaggcuauuauuguuacuuguggugagcaacuugcuccugccucagggcguggugggcgaggccgccuuguuggugugccaguacaccauccagagccucauccaccucaccggcgaggaccccggcuucuucaacguggagauccccgaguuccccuucuaccccaccugcaacgugugcaccgccgacgugaacgugaccaucaacuucgacgugggcggcaagaagcaccagcuggaccuggacuucggccagcugaccccgcacaccaaggccguguaccagcccaggggcgccuucggcggcagcgagaacgccaccaaccuguuccugcuggagcugcugggcgccggcgagcuggcccugaccaugagguccaagaagcugcccaucaaugugaccacaggagaggagcagcaggugagccuggagagcguggacguguacuuccaggacguguucggcaccauguggugccaccacgccgagaugcagaacccaguuuacuugauuccugagacagugcccuacaucaagugggacaacugcaacagcaccaacaucaccgccguggugagggcccagggccuggacgugacccugccccugagccugcccaccagcgcccaggauagcaacuucagcgugaagaccgaaaugcugggcaacgagaucgacaucgagugcaucauggaggacggcgagaucagccaggugcugcccggcgacaacaaguucaacauuaccugcagcggcuacgagagccacgugcccagcggcggcauccugaccucaacuucacccguggccacuccgauccccggcaccggcuacgccuacagccugcgucugacaccuaggcccgugagcagguuccugggcaauaacagcauccuguacguguucuacagcggcaacggccccaaggcuuccggcggcgacuacuguauucaaucaaacaucguguucagcgacgagauaccagccagccaggacaugccuacuaacaccaccgacaucaccuaugugggagacaaugcuacuuacagcgugcccauggugaccagcgaggacgccaacagcccaaaugucaccgugaccgccuucugggccuggcccaacaacacugagacagacuucaagugcaaguggacccucacauccggcaccccuagcggaugcgagaacaucagcggagcguucgccagcaacaggaccuucgauauaacagugagcggccugggcaccgcuccuaagacccugaucaucaccaggacggccacaaaugcaacuacuacuacacacaaggugaucuucagcaaggcuccggaaucacaagugaggcagcaguucucaaaggauaucgagaagcuucugaacgagcaaguuaacaaggaaaugcagagcaguaaucucuacaugagcaugagcagcuggugcuacacccacucccuggacggagcaggccucuuccuguucgaccacgcagccgaggaguacgagcacgcuaagaaguugaucauuuucuugaacgagaacaacgugcccgugcagcuaacgucaaucagcgcaccugagcacaaguucgagggccugacccagaucuuccagaaggccuacgaacacgaacagcacaucuccgagagcaucaacaauauuguggaucacgcuaucaaguccaaggaccacgcuaccuucaacuuccugcagugguacguggccgagcaacaugaggaggaggugcuguucaaggacauccuggacaagaucgagcugaucgguaaugagaaucacggccuguaccuggccgaccaguacgugaagggcaucgccaagagccggaaguca

SEQ ID NO: 111 - protein, 627 aa, Artificial Sequence
  Synthetic Polypeptide
MDSKGSSQKGSRLLLLLVVSNLLLPQGVVGEAALLVCQYTIQSLIHLTGEDPGFFNVEIPEFPFYPTCNVCTADVNVTINFDVGGKKHQLDLDFGQLTPHTKAVYQPRGAFGGSENATNLFLLELLGAGELALTMRSKKLPINVTTGEEQQVSLESVDVYFQDVFGTMWCHHAEMQNPVYLIPETVPYIKWDNCNSTNITAVVRAQGLDVTLPLSLPTSAQDSNFSVKTEMLGNEIDIECIMEDGEISQVLPGDNKFNITCSGYESHVPSGGILTSTSPVATPIPGTGYAYSLRLTPRPVSRFLGNNSILYVFYSGNGPKASGGDYCIQSNIVFSDEIPASQDMPTNTTDITYVGDNATYSVPMVTSEDANSPNVTVTAFWAWPNNTETDFKCKWTLTSGTPSGCENISGAFASNRTFDITVSGLGTAPKTLIITRTATNATTTTHKVIFSKAPESQVRQQFSKDIEKLLNEQVNKEMQSSNLYMSMSSWCYTHSLDGAGLFLFDHAAEEYEHAKKLIIFLNENNVPVQLTSISAPEHKFEGLTQIFQKAYEHEQHISESINNIVDHAIKSKDHATFNFLQWYVAEQHEEEVLFKDILDKIELIGNENHGLYLADQYVKGIAKSRKS

SEQ ID NO: 112 - RNA, 1884 nt, Artificial Sequence
  Synthetic Polynucleotide
auggacagcaagggcagcagccagaagggcucccgguuguugcucuugcucguggugagcaacuuguuguugccucagggcguggugggcgaggccgccuuguuggugugccaguacaccauccagagccucauccaccucaccggcgaggacccuggcuucuucaacguggagaucccugaguucccuuucuacccuaccugcaacgugugcaccgccgacgugaacgugaccaucaacuucgacgugggcggcaagaagcaccagcuggaccuggacuucggccagcugaccccucacaccaaggccguguaccagccuagaggcgccuucggcggcagcgagaacgccaccaaccuguuccugcuggagcugcugggcgccggcgagcuggcccugaccaugagaaguaagaagcugccuaucaacgucacuacuggcgaggagcagcaggugagccuggagagcguggacguguacuuccaggacguguucggcaccauguggugccaccacgccgagaugcagaacccuguguaccugaucccagaaaccgugccuuacaucaagugggacaacugcaacagcaccaacaucaccgcuguggugagagcccagggccuggacgugacccugccucugagccugccuaccagcgcccaagacaguaacuucagcgugaagacggagaugcugggcaacgagaucgacaucgagugcaucauggaggacggcgagaucagccaggugcugccuggcgacaacaaguucaacauaacaugcagcggcuacgagagccacgugccuagcggcggcauccugaccuccaccagcccuguggccaccccuaucccuggcaccggcuacgccuacagccugagacucacgccaagaccugugagcagauucuuaggaaacaacagcauccuguacguguucuacagcggcaacggcccuaaggccuccggcggugacuacuguauccagucuaacaucguguucagcgacgaaaucccagccagccaggacaugccuacaaacaccaccgacaucacuuaugucggcgacaaugcgacauacagcgugccuauggugaccagcgaggacgccaacagcccuaacguaaccgugaccgccuucugggccuggccuaacaacaccgaaaccgacuucaagugcaaguggacuuuaacuaguggcaccccuucuggcugcgagaacaucagcggcgcauucgccagcaacagaaccuucgauaucaccgugagcggccugggcaccgccccuaagacccugaucaucaccagaaccgcaacuaaugcaacuacaacaacccacaaggugaucuucagcaaggccccuggcuccggcucugccggcaguggcagcgcaggcaguggauccgccgguucagguuccgccaugcagaucuacgagggcaagcugaccgccgagggccugagauucggcaucguggccagcagguucaaccacgcccugguggacagacugguggagggcgccaucgacgccaucgugagacacggaggaagagaggaggauauaacacuggucagagugccuggaucaugggaaaucccugucgccgcuggugagcuggcaagaaaggaggacaucgaugcggugaucgccaucggcgugcugauccgcggugcaacuccacacuucgacuacaucgccucugaagugucaaagggccuugcggaccugucccucgaacucagaaagccuaucacauucggagugauuacugcagauacccuggagcaggccaucgagagagccggcaccaagcacggcaacaagggcugggaagccgcgcugucugccauagaaauggcaaaccuuuucaagucccuuaga

SEQ ID NO: 113 - protein, 628 aa, Artificial Sequence
  Synthetic Polypeptide
MDSKGSSQKGSRLLLLLVVSNLLLPQGVVGEAALLVCQYTIQSLIHLTGEDPGFFNVEIPEFPFYPTCNVCTADVNVTINFDVGGKKHQLDLDFGQLTPHTKAVYQPRGAFGGSENATNLFLLELLGAGELALTMRSKKLPINVTTGEEQQVSLESVDVYFQDVFGTMWCHHAEMQNPVYLIPETVPYIKWDNCNSTNITAVVRAQGLDVTLPLSLPTSAQDSNFSVKTEMLGNEIDIECIMEDGEISQVLPGDNKFNITCSGYESHVPSGGILTSTSPVATPIPGTGYAYSLRLTPRPVSRFLGNNSILYVFYSGNGPKASGGDYCIQSNIVFSDEIPASQDMPTNTTDITYVGDNATYSVPMVTSEDANSPNVTVTAFWAWPNNTETDFKCKWTLTSGTPSGCENISGAFASNRTFDITVSGLGTAPKTLIITRTATNATTTTHKVIFSKAPGSGSAGSGSAGSGSAGSGSAMQIYEGKLTAEGLRFGIVASRFNHALVDRLVEGAIDAIVRHGGREEDITLVRVPGSWEIPVAAGELARKEDIDAVIAIGVLIRGATPHFDYIASEVSKGLADLSLELRKPITFGVITADTLEQAIERAGTKHGNKGWEAALSAIEMANLFKSLR

SEQ ID NO: 114 - protein, 865 aa, Artificial Sequence
  Synthetic Polypeptide
MEAALLVCQYTIQSLIHLTGEDPGFFNVEIPEFPFYPTCNVCTADVNVTINFDVGGKKHQLDLDFGQLTPHTKAVYQPRGAFGGSENATNLFLLELLGAGELALTMRSKKLPINVTTGEEQQVSLESVDVYFQDVFGTMWCHHAEMQNPVYLIPETVPYIKWDNCNSTNITAVVRAQGLDVTLPLSLPTSAQDSNFSVKTEMLGNEIDIECIMEDGEISQVLPGDNKFNITCSGYESHVPSGGILTSTSPVATPIPGTGYAYSLRLTPRPVSRFLGNNSILYVFYSGNGPKASGGDYCIQSNIVFSDEIPASQDMPTNTTDITYVGDNATYSVPMVTSEDANSPNVAVTAFWAWPNNTETDFKCKWTLTSGTPSGCENISGAFASNRTFDITVSGLGTAPKTLIITRTATNATTTTHKVIFSKAPESTTTSPTLNTTGFADPNTTTGLPSSTHVPTNLTAPASTGPTVSTADVTSPTPAGTTSGASPVTPSPSPWDNGTESKAPDMTSSTSPVTTPTPNATSPTPAVTTPTPNATSPTPAVTTPTPNATSPTLGKTSPTSAVTTPTPNATGPTVGETSPQANATNHTLGGTSPTPVVTSQPKNATSAVTTGQHNITSSSTSSMSLRPSSNPETLSPSTSDNSTSHMPLLTSAHPTGGENITQVTPASISTHHVSTSSPAPRPGTTSQASGPGNSSTSTKPGEVNVTKGTPPQNATSPQAPSGQKTAVPTVTSTGGKANSTTGGKHTTGHGARTSTEPTTDYGGDSTTPRPRYNATTYLPPSTSSKLRPRWTFTSPPVTTAQATVPVPPTSQPRFSNLSMLVLQWASLAVLTLLLLLVMADCAFRRNLSTSHTYTTPPYDDAETYV

SEQ ID NO: 115 - protein, 30 aa, Artificial Sequence
  Synthetic Polypeptide
MDSKGSSQKGSRLLLLLVVSNLLLPQGVVG

SEQ ID NO: 116 - protein, 18 aa, Artificial Sequence
  Synthetic Polypeptide
MDWTWILFLVAAATRVHS

SEQ ID NO: 117 - protein, 20 aa, Artificial Sequence
  Synthetic Polypeptide
METPAQLLFLLLLWLPDTTG

SEQ ID NO: 118 - protein, 24 aa, Artificial Sequence
  Synthetic Polypeptide
MLGSNSGQRVVFTILLLLVAPAYS

SEQ ID NO: 119 - protein, 17 aa, Artificial Sequence
  Synthetic Polypeptide
MKCLLYLAFLFIGVNCA

SEQ ID NO: 120 - protein, 15 aa, Artificial Sequence
  Synthetic Polypeptide
MWLVSLAIVTACAGA

SEQ ID NO: 121 - RNA, 10 nt, Artificial Sequence
  Synthetic Polynucleotide
  misc_feature (4)..(4): n is a or g
ccrnccaugg

SEQ ID NO: 122 - RNA, 11 nt, Artificial Sequence
  Synthetic Polynucleotide
gggauccuacc

SEQ ID NO: 123 - RNA, 9 nt, Artificial Sequence
  Synthetic Polynucleotide
  misc_feature (8)..(9): n is u or a
uuauuuann

SEQ ID NO: 124 - RNA, 2595 nt, Artificial Sequence
  Synthetic Polynucleotide
auggaagccgcccuauuagucugccaguacaccauucaaagccucauccacuugacuggggaggauccuggguucuuuaacguggaaaucccggaauucccuuucuacccaacuugcaacgugugcacggcugacgucaacgugacuaucaacuucgaugugggagggaagaaacaucaacuugaucuggacuuuggccagcuuacuccccacaccaaggccguguaccagccccgcggcgcauucggugggagcgagaacgcgacaaaucuauucuugcuggaacugcugggcgcaggagagcucgcccugacgaugcgaucuaagaagcuucccaucaacguuaccacuggcgaggagcagcaggugucccucgaaagcgucgacgucuauuuccaagacgucuucggaacaauguggugccaccacgcugagaugcagaaccccguauaucuuauucccgaaaccgugccauacaucaagugggacaacugcaacucaacuaacaucacugcaguagugcgcgcccagggacuggacgucacuuugccacugucacugcccacaucagcccaagacagcaacuucagcgucaagacagaaaugcugggcaacgaaaucgacaucgaaugcauaauggaggauggggaaauuucccagguccuccccggugauaacaaguuuaauauuacuuguucuggauaugaaucccaugugccgucuggugguauacugacgaguacaucgccaguggcuaccccaauccccgggacaggcuaugccuacagccugagacugacgccaagaccaguuuccagguuucuggggaauaacucuauccuguauguguuuuauucugguaacggacccaaggcauccggcggugauuauuguauccagagcaauauaguguucucugaugagauuccggccucccaggauaugccaaccaacacgacagauaucaccuaugucggggacaacgccacauauagcgugccaauggugaccagcgaagaugccaauucucccaacgucacagugacagccuuuugggcguggccuaauaacacagaaacugacuuuaaaugcaaauggacucuaaccucaggcaccccaucuggcugcgagaacauaagcggcgcguuugcaucgaacagaacuuuugauauuacaguaucuggguugggcacugcgcccaagacucuaauaauuacacggacggccacuaacgccaccacgacgacucacaaggugaucuucagcaaagcucccgaaucuacuacuaccucgccgacacugaauacgacaggauucgccgacccaaauacuacgaccggccuucccagcucgacacaugugccuacaaacuuaacggcgcccgccaguaccggccccaccgugagcaccgcugacgucaccucuccuaccccugccgggacuacaaguggugcuuccccaguuacucccagcccuagcccuugggacaacggcacugagagcaaagcuccggacaugaccagcaguaccaguccagugacaacuccgacacccaaugcgacguccccaacucccgccgugaccacgccaacaccaaaugccacgucaccuacuccagcggucaccaccccaacgccaaacgcuacuagucccacucuaggcaagacaucucccaccuccgcugucaccaccccuacacccaaugcuaccggucccacggugggugagacuagcccacaggccaacgcaacuaaucauacauuggguggcacaagcccaacgcccgucgucacuagccagccuaagaacgccacaagcgcuguaacuaccggccagcacaauauaacaaguuccaguacuagcaguaugucucugagacccagcucaaauccugaaacccucucgcccucuacgucggauaacuccacgucccacaugccucuacucacaagcgcgcacccuaccggaggagagaauaucacucagguuaccccagcuucuaucucgacucaccaugucucuacuucuuccccagcgccacggcccggcacuaccagccaggcuagcgggccagguaauuccuccacuagcacuaaaccuggcgaagucaacguuaccaagggaacaccuccccagaaugcaaccucgccccaagcucccucuggacagaagacagccgucccuaccgucacaagcaccggugggaaggcgaauucuacgacaggcgggaagcacacuaccggacacggagcaaggacauccacugagcccacgaccgacuacgguggcgacuccaccacgcccagacccagguacaaugcgacuaccuaccugccgccuuccacuuccagcaaacugaggccucguuggacuuucacuucuccaccagucaccaccgcucaggcuaccgugccugucccgccgaccucucagccccgguuuucaaauuugaguaugcucgugcugcagugggccagccuggcagugcuuacccuccugcucuugcugguuauggcugacugcgccuuccgacguaacuuauccaccagucauacuuacacuacaccuccuuaugacgacgcggagaccuacgug

SEQ ID NO: 125 - protein, 865 aa, Artificial Sequence; identical to SEQ ID NO: 28
  Synthetic Polypeptide

SEQ ID NO: 126 - RNA, 2595 nt, Artificial Sequence
  Synthetic Polynucleotide
auggaagccgccuuacuggucugccaguacacuauucagucccucauccaucucacaggcgaggacccgggguucuucaacgucgaaauccccgaauucccauucuaucccaccuguaacgucugcacagccgacguuaacguuacaaucaauuucgacgugggcgggaagaaacaccagcuggaccucgacuuugggcagcugacgccccacacuaaagccguuuaccagcccaggggugcauucgguggaucugagaaugcuacaaaccucuuucugcuugagcugcuuggugcuggagagcuggcccugacaaugcgcagcaagaaguugccaaucaaugugaccacaggugaagaacagcaggugucccuagaauccguggauguguacuuccaggacguuuucggcacaauguggugccaucacgcagagaugcagaauccgguguaccuuauccccgaaacagugccguacauuaaaugggauaauuguaacuccacaaacaucacggcaguggugcgcgcucaggggcuggacgugacacucccgcuuuccuuaccaacaagugcucaagauuccaacuuuucugugaagaccgagaugcugggcaacgagauugauauugaaugcaucauggaggauggcgagauuagccagguguugcccggcgacaauaaauuuaauauuaccuguuccggcuaugagucacacgugccaaguggaggcauucucacgagcaccucucccguugcaacacccauuccugggacaggguacgcauauagucucaggcugacaccgagaccgguaucgcgcuucuuagguaacaauuccaucuuguauguguuuuacagcggaaacgggccaaaggccucaggaggagacuacugcauccagagcaauauagucuuuagcgacgagaucccugccucacaagacaugcccaccaacaccaccgacaucacguacgucggugauaaugccacuuacagcgugccuauggugaccucugaagacgcaaauucacccaaugucacgguuaccgcauucugggcuuggccaaauaacacugaaaccgacuucaaguguaaauggacccuaaccagcggcaccccaucagggugcgagaauaucagcggggccuucgccagcaaccggacauucgacaucaccgugucaggacuagggacugcuccaaagacauuaauuauuacacggacagcaacuaacgcuacgacuacgacucacaaagugauauuuagcaaagcgcccgaaucgacuacuacgagcccgacccuaaacaccaccgguuucgccgaucccaacacaacuacuggucucccaucuucgacccauguuccaacgaaucugacagcuccagcaaguacggggcccacugugaguacagccgacguuacuagcccaacucccgcggguacgacuaguggcgcgucuccagugaccccuucgccuucuccgugggauaauggaaccgagucaaaggcuccugauaugaccagcuccaccagucccguuacaacgccaacgcccaaugcaacgaguccaacuccggcgguuaccacuccgacaccaaacgccaccucgcccacgccugcaguuacuacgcccaccccuaaugcuacgucacccacucugggaaagaccucaccaaccucugccgugacuacuccuacaccuaaugccacaggacccacaguuggggaaaccagcccacaggcuaacgcaacuaaucauacgcuuggcgggaccucucccacgcccguggucacuucacagccuaagaaugccacaagcgcugugacuacaggccagcauaauauaaccagcaguucaaccaguagcaugucccugcguccuucauccaauccugagacucugagccccagcacuagugacaacucaacuucucacaugccguugcugaccuccgcgcaucccacgggcggugagaauaucacacaggugacacccgcgucuauuagcacacaucacgugaguacguccucgcccgcaccccgcccaggcacaaccucacaagcaucagguccggggaauagcagcacaaguaccaagccuggcgaagugaauguaaccaagggcacgccaccgcagaacgccacauccccucaagccccauccggccagaagaccgcuguacccaccgugacaucaacuggggggaaagcgaacucaacuaccggugggaagcauacaacagggcacggugccagaacuucuacagagccaaccacggacuacggaggggacagcacaacgcccagaccgcgguacaaugcgaccacauaccugccucccucaacuucgaguaagcugcgacccagauggaccuuuacuucuccuccugucaccaccgcucaagccaccgucccgguuccaccuacuucccagccuagauucuccaaucugagcaugcuuguccuacagugggcaucacucgcgguacuaaccuugcugcuacuguuggugauggcggacugcgcguuucgccgcaacuuauccaccucccacacguacacaacaccucccuaugaugacgcugagacuuacguc

SEQ ID NO: 127 - protein, 865 aa, Artificial Sequence; identical to SEQ ID NO: 28
  Synthetic Polypeptide

SEQ ID NO: 128 - RNA, 2571 nt, Artificial Sequence
  Synthetic Polynucleotide
augacccggcggcggguguuaagcgugguggugcucuuagccgccuuagccugccggcuuggcgcccagacuccggagcagcccgcuccucccgccaccaccguccagcccaccgccacccgccagcagaccuccuuccccuuccgcgucugcgagcucuccucccacggcgaccucuuccgcuucuccuccgacauccagugccccuccuucggcacccgcgagaaccacaccgagggccuccucauggucuucaaggacaacaucauccccuacuccuucaagguccgcuccuacaccaagaucgucaccaacauccucaucuacaacggcugguacgccgacucugugacuaaucgccacgaggagaaguucuccgucgacuccuacgagacugaccagauggacaccaucuaccagugcuacaacgccgucaagaugaccaaggacggccucacccgcgucuacgucgaccgcgacggcgucaacaucaccgucaaccucaagccuacaggcggccucgccaacggcguccgccgcuacgccucccagaccgagcucuacgacgccccuggcuggcucaucuggaccuaccgcaccaggaccacugucaauugccucaucaccgacaugauggccaaguccaacuccccuuucgacuucuucgugaccaccacaggccagaccgucgagaugucgccauucuaugacggcaagaacaaggagacuuuccacgagagagcggacucuuuccauguccgcaccaacuacaagauugucgacuacgacaaccgcggcaccaauccacagggcgagcgccgcgccuuccucgacaagggcaccuacacccucuccuggaagcucgagaaccgcaccgccuacuguccucuccagcacuggcagaccuucgauuccaccaucgccaccgagacuggcaaguccauccauuucgucaccgacgaaggaacaucuucauucgucacaaauacaaccgugggcaucgagcuccccgacgccuucaagugcaucgaggagcaggucaacaagaccaugcacgagaaguacgaggccguccaggaccgguauacaaagggccaggaggccaucaccuacuucaucaccagcggaggucugcuucucgccuggcuuccacucacaccucgcucccuggccacagugaagaaccucacugaguugaccaccccaacaaguuccccaccuaguaguccuagcccuccugcuccuuccgccgcccgcggcuccacgccugccgccguccugcggagacggagaagggacgccggcaacgcuaccacuccugugccgccgacagccccuggaaagucccuagguacccucaacaacccagcgacaguucagauccaguucgccuacgacucucucaggcgccagaucaaccgcaugcuuggugaccuugcccgcgccuggugccucgagcagaagcgccagaacauggugcuucgugaacuaacaaagauuaauccuacuacagugauguccuccaucuacggcaaggccgucgccgccaagcgccucggcgacgucaucuccgucucccagugcgucccagugaaccaggcuaccgugacccucaggaaguccaugagagugccaggcuccgagacaaugugcuacucccgcccacucgucuccuucuccuucaucaacgacacaaagaccuacgagggccaguuaggcacugacaacgagaucuucuugacuaagaagaugacugagguaugccaggcaacuucucaauacuacuuccagucuggaaaugagauccacguauauaacgacuaccaccacuucaagacuauugaacucgacggaauugccacccuccaaacauucaucucacugaauaccucccucaucgagaacaucgacuucgccucccucgagcuguauagcagagacgagcagcgcgccuccaacgucuucgaccucgagggcaucuuccgcgaguacaacuuccaggcacagaacauagccggccuccguaaggaucuggacaaugccguguccaacggccgcaaccaguucgucgacgguuugggugaacucauggacucucugggcuccgucggccaguccauaacuaacuuagucucuacggugggaggccuauucagcagccuggugagcggcuucaucucuuucuucaagaaccccuucggcggcaugcucauccucguccucgucgccggcgucgucauacuggugaucucacucacaaggaggacgcgccaaaugucccagcagccagugcagaugcucuacccaggcauagacgagcucgcucagcagcacgcgucgggugagggaccaggcaucaauccuaucuccaagacugagcugcaagccauuaugcucgcccuccacgagcagaaccaggaacagaagcgggccgcccagcgagcugccggccccuccgucgccaguagggcacuacaagccgcccgggaccgcuucccaggccugagaaggaggagauaccacgacccagagacagccgcugcccuccuuggcgaagcagaaaccgaguuc

SEQ ID NO: 129 - protein, 857 aa, Artificial Sequence
  Synthetic Polypeptide
MTRRRVLSVVVLLAALACRLGAQTPEQPAPPATTVQPTATRQQTSFPFRVCELSSHGDLFRFSSDIQCPSFGTRENHTEGLLMVFKDNIIPYSFKVRSYTKIVTNILIYNGWYADSVTNRHEEKFSVDSYETDQMDTIYQCYNAVKMTKDGLTRVYVDRDGVNITVNLKPTGGLANGVRRYASQTELYDAPGWLIWTYRTRTTVNCLITDMMAKSNSPFDFFVTTTGQTVEMSPFYDGKNKETFHERADSFHVRTNYKIVDYDNRGTNPQGERRAFLDKGTYTLSWKLENRTAYCPLQHWQTFDSTIATETGKSIHFVTDEGTSSFVTNTTVGIELPDAFKCIEEQVNKTMHEKYEAVQDRYTKGQEAITYFITSGGLLLAWLPLTPRSLATVKNLTELTTPTSSPPSSPSPPAPSAARGSTPAAVLRRRRRDAGNATTPVPPTAPGKSLGTLNNPATVQIQFAYDSLRRQINRMLGDLARAWCLEQKRQNMVLRELTKINPTTVMSSIYGKAVAAKRLGDVISVSQCVPVNQATVTLRKSMRVPGSETMCYSRPLVSFSFINDTKTYEGQLGTDNEIFLTKKMTEVCQATSQYYFQSGNEIHVYNDYHHFKTIELDGIATLQTFISLNTSLIENIDFASLELYSRDEQRASNVFDLEGIFREYNFQAQNIAGLRKDLDNAVSNGRNQFVDGLGELMDSLGSVGQSITNLVSTVGGLFSSLVSGFISFFKNPFGGMLILVLVAGVVILVISLTRRTRQMSQQPVQMLYPGIDELAQQHASGEGPGINPISKTELQAIMLALHEQNQEQKRAAQRAAGPSVASRALQAARDRFPGLRRRRYHDPETAAALLGEAETEF

SEQ ID NO: 130 - RNA, 1375 nt, Artificial Sequence
  Synthetic Polynucleotide
gggaaauaagagagaaaagaagaguaagaagaaauauaagagccaccaugagcgacgaggguccgggcacaggacccgguaacggguugggcgaaaagggugacacuagcgggcccgaagguuccggcggaucuggcccgcaacgcagagguggugauaaccacggucgcgguagaggcagaggccguggccgggguggcggaaggcccggugccccuggagggucagggucuggcccaaggcaccgugauggggugcgucgcccccagaaacgcccguccuguaucggcugcaagggcacgcauggcggaacgggagguggcgcaggagccggaggugcaagaggucgcggggggucaggggggagagguagagggggaucaggggggcggagagggcggggucgagaaagagcaagagguggcuccagagagcgcgcucggggucgcgggcgaggccggggugaaaaacggccccggagcccauccucgcaaucaucaagcucgggaucgccaccucggcggccgccccccggcaggcgucccuuuuuccacccagugggcgaagccgacuacuucgaguaccaccaggagggaggaccggauggugagccggauguuccucccggcgccaucgaacaagguccugccgaugauccaggcgaggggcccucaacaggcccccgagggcagggggacgggggacgucggaagaaaggaggcugguuuggcaagcaccgaggacagggggguagcaacccgaaauuugagaacaucgccgaggggcucagggcucuccuagcccguagccacgucgaaagaacuaccgaugagggcaccuggguugccggcguguucguguacggggguagcaagaccucucuauacaaccuucggagggggacugcacuugcuaucccccaaugccgccucacaccacugucucgccugccauucggcauggcccccggcccggggccacagccugggccccuacgggaaucuauuguuugcuauuuuaugguguuccugcagacccauaucuucgcagaaguccugaaagacgccaucaaagacuuaguuaugacuaaacccgcacccaccugcaacauucgcgugaccguaugcagcuuugaugauggcgucgaucugcccccaugguuccccccuauggucgagggcgccgccgccgaaggggacgacggggaugacggggaugaaggcggggacggcgaugagggcgaggagggccaggaaugauaauaggcuggagccucgguggccaugcuucuugccccuugggccuccccccagccccuccuccccuuccugcacccguacccccguggucuuugaauaaagucugagugggcggc

SEQ ID NO: 131 - RNA, 1375 nt, Artificial Sequence
  Synthetic Polynucleotide
gggaaauaagagagaaaagaagaguaagaagaaauauaagagccaccaugagugacgagggaccugggacuggccccgggaacggucugggugagaaaggugacacgucugguccugaaggaucuggcgguucagggccgcagcgcagaggaggagacaaccacgguagaggacguggacgcgggagaggccgagggggcggaagaccuggugcaccgggcgguuccggcucggggccccgccacagggauggggugcggagaccacagaagcgccccucuugcaucggcugcaagggaacccauggggguaccggagggggagcuggugcagguggcgcccgugguagggguggcagcggggggcguggaagaggugguucaggcggacggaggggacgcggacgugaacgugcccggggaggaucccgggagagggcacggggccgcggcagaggcagaggggagaagagaccuagauccccuagcucucaauccagcagcagugggucccccccgaggcgaccgccuccagguaggcgcccuuucuuccaccccguuggcgaggcagauuacuucgaauaucaucaagagggggggcccgauggcgagccggacguaccacccggugcuaucgagcaagguccggcugacgauccuggugaagggccaaguaccggaccuagggggcagggcgacggugguaggcguaaaaaaggagggugguucggcaaacaucgcggccagggagggagcaaccccaaguuugaaaauaucgccgaagggcuacgagcuuugcucgcgaggucccauguggaacgaacuacagacgagggcaccuggguggcuggugucuucguuuauggcgggagcaagaccucccuguauaaucuaaggcggggcacagcccuggccauaccgcagugucgccugacaccccugucucgccugccuuuuggcauggcgccagggccaggaccacaaccugggccccugcgcgaaaguauuguguguuacuucauggucuuccugcagacacauauuuucgcagaaguccuaaaggaugcaauaaaggaucucguaaugacgaagcccgccccaacguguaauauuaggguuacggucuguaguuucgaugacgggguagaucucccccccugguucccaccuauggucgagggugccgcugcggagggggacgauggcgacgacggcgaugaaggcggggauggcgacgagggggaggagggacaggaaugauaauaggcuggagccucgguggccaugcuucuugccccuugggccuccccccagccccuccuccccuuccugcacccguacccccguggucuuugaauaaagucugagugggcggc

SEQ ID NO: 132 - RNA, 1375 nt, Artificial Sequence
  Synthetic Polynucleotide
gggaaauaagagagaaaagaagaguaagaagaaauauaagagccaccaugucagacgagggcccaggcacgggcccuggaaacggacugggagagaagggggauaccucagggccagaggguaguggggguagcgggccucagagaagggggggcgacaaucacggucggggaagagggagagguagggguagaggaggaggccgucccggggcuccuggcgguuccggguccggcccucgccacagagauggcgugaggagaccucagaagcguccguccuguauugggugcaaggggacccacgguggcaccgguggcggagcuggggcaggaggugcuagaggaagaggcgguucagguggaaggggucgcggugguucaggaggacggcgcggccgggggagagagcgggcaagaggcggcagcagggagcgggcaagaggacgagggaggggccgaggcgagaagcgaccuaggucgccuaguucacagagcuccaguucugggucgcccccccggcggccgccuccugggcgaagacccuuuuuccaccccgugggggaggcugacuacuucgaguaccaccaggagggcggcccagacggagagcccgauguuccgccuggggccauugaacaaggcccugcagaugacccaggggaaggaccaucaaccggcccuaggggacagggcgauggggggagacggaaaaagggagggugguucgggaagcaccgcggccagggggggucuaauccgaaauucgaaaacauugccgagggccuccgugcuuuguuggcuagaucacacguggaaagaaccacggaugaaggcacguggguggcgggcgucuucguguauggugggaguaagaccucccuguauaaccucaggcguggcacagcccuugccaucccacagugcaggcucacaccccuuagcaggcuucccuuuggcauggcuccuggucccggcccccagcccgguccacugcgagaauccauuguauguuacuucaugguuuucuugcagacacauaucuucgccgaggugcugaaagacgccauuaaagaccuggugaugacaaagccugcccccacgugcaauauccgugugaccgucugcuccuuugaugacggagucgaccugccucccugguuucccccaauggucgagggcgcugcggcggaaggggacgacggcgaugauggugacgagggcggugauggcgacgaaggugaagagggucaggagugauaauaggcuggagccucgguggccaugcuucuugccccuugggccuccccccagccccuccuccccuuccugcacccguacccccguggucuuugaauaaagucugagugggcggc

SEQ ID NO: 133 - RNA, 1375 nt, Artificial Sequence
  Synthetic Polynucleotide
gggaaauaagagagaaaagaagaguaagaagaaauauaagagccaccaugagcgacgaggguccaggcacaggcccggggaacggguugggagaaaaaggggacacuuccgguccagaaggcuccggggggagcggaccucagagaagagguggugauaaucacgggagagggagagggcggggcaggggacgugggggcgguagaccuggggcgccgggggguuccggcuccggaccacggcauagggauggugugcgaaggccgcagaagcggccgucuuguauaggcugcaaaggcacucacggugguaccggggggggagcaggagcaggaggcgcucgaggucggggcggguccggcggcagaggccgcggugguucugggggaaggaggggaagagggagagaacgcgcccgcggaggcucucgcgaacgggccagagggcgggggagggggcgcggggagaaaaggcccaggucgccaaguagucaguccuccaguagcggcagcccaccccgcagaccuccuccaggacgacgaccuuucuuucaucccgucggcgaggccgauuacuuugaguaccaucaggaaggggggccugauggagaaccggauguuccuccuggugcuaucgaacagggccccgccgacgauccaggcgagggccccaguacgggcccuagaggccagggagauggagguagaaggaagaaggggggaugguuuggcaagcacagagggcagggagguaguaaucccaaauuugagaauauugccgagggucugcgggcacuucuggcccggucucauguugagagaacgacugaugagggaacauggguggcuggcgucuuuguguauggcgguaguaaaaccagccucuacaauuuacggcgugggacagcgcuagcuauuccgcaaugccggcugaccccuuugucuaggcugcccuuugguauggcccccggccccggcccacagccugggccuuugcgggaaagcaucgucugcuacuuuaugguguuccuccagacccacaucuuugcagaggugcuuaaggacgccauaaaggaccugguuaugaccaaacccgccccuaccugcaauauccgcgucacggugugcuccuucgacgacgggguugacuugccuccaugguucccacccaugguagagggcgcugcugccgagggggaugauggagacgacggagacgagggcggcgauggcgaugaaggcgaagaaggccaggaaugauaauaggcuggagccucgguggccaugcuucuugccccuugggccuccccccagccccuccuccccuuccugcacccguacccccguggucuuugaauaaagucugagugggcggc

SEQ ID NO: 134 - RNA, 1375 nt, Artificial Sequence
  Synthetic Polynucleotide
gggaaauaagagagaaaagaagaguaagaagaaauauaagagccaccaugucugacgaaggcccgggcacaggcccaggcaacggauugggcgaaaaaggugauacaagcgggccagaagggagcgggggcucugggccccagagacgggggggugacaaucacggccgaggaaggggaaggggcaggggaagaggcggaggacggccuggcgcuccuggaggcucuggcucagguccaagacauagggauggggucagaagaccacagaagagaccuagcuguauuggaugcaaggguacacacgguggcacgggcggcggugcuggcgcugggggcgcgagaggacguggagguucaggcgggagaggucgaggaggcucuggaggccgcagggggagaggacgagagagggcccggggggggucccgggaaagagcuagagggaggggacgcgggcggggggaaaagcggccucgcucuccuucuucucaaucuuccuccucugguucuccgccccgacgccccccaccgggcaggaggccauuuuuucacccugucggcgaggcagacuacuucgaguaccaccaagaaggaggcccagacggcgagccugaugugccgccaggugccaucgagcaggggccagcugaugacccgggggagggaccuagcacggggccccgcggucagggcgacggagggaggagaaaaaaaggugggugguuuggcaagcauagagggcaggguggcucaaacccaaaguuugaaaacaucgcagaaggucuucgggcucugcuggcccgcucucauguagagcgcacuacugacgaaggcaccuggguggccgggguguucguguacggaggaucuaagaccagucuguacaaccuccggagggggacagcucucgcuaucccccaguguaggcucaccccuuugagucgccuuccguucggaauggcuccuggcccgggcccccagcccgggccacuaagagagagcaucguaugcuacuuuaugguauuuuugcaaacccacaucuucgcugaagugcuuaaggacgccaucaaagaccuggugaugacaaaaccagcuccaacaugcaauauuaggguaaccguaugcuccuucgaugauggcgucgaccuuccaccuugguuccccccaaugguggagggagccgcagcagaaggagacgauggugaugauggagacgaaggcggggauggcgacgaaggagaggagggacaggaaugauaauaggcuggagccucgguggccaugcuucuugccccuugggccuccccccagccccuccuccccuuccugcacccguacccccguggucuuugaauaaagucugagugggcggc

SEQ ID NO: 135 - RNA, 892 nt, Artificial Sequence
  Synthetic Polynucleotide
gggaaauaagagagaaaagaagaguaagaagaaauauaagagccaccaugggcagaagacccuucuuucaccccgugggagaagccgacuauuucgaguaccaccaggagggcgguccugacggcgagcccgacgugccuccaggcgccaucgaacagggccccgcugacgauccuggcgaggggccuuccacaggcccucgcggccagggagaugggggaaggcggaagaaggggggcugguuuggcaagcauaggggccagggcggcuccaaucccaaguucgagaauaucgccgaggggcuccgggcucugcuggcccggucgcacgucgaacguaccacugacgaggggacguggguggccggcgucuuuguguacggaggauccaagaccucccuguacaaccugagaagggggaccgcccuugccaucccucagugcagacucaccccccugagcaggcuccccuuugggauggcuccugggccaggcccccagcccgggccccucagggaaagcaucguguguuacuuuaugguguuucugcagacacacauuuuugcagaaguucugaaagaugcaaucaaggaucuggugaugaccaagccugcaccuacgugcaauaucagggugacaguaugcuccuucgacgacgguguggaccucccccccugguucccacccauggucgagggggccgccgccgagggagacgauggcgacgacggugaugaggggggagacggagaugaaggcgaggaggggcaggagugauaauaggcuggagccucgguggccaugcuucuugccccuugggccuccccccagccccuccuccccuuccugcacccguacccccguggucuuugaauaaagucugagugggcggc

SEQ ID NO: 136 - RNA, 892 nt, Artificial Sequence
  Synthetic Polynucleotide
gggaaauaagagagaaaagaagaguaagaagaaauauaagagccaccaugggacggagaccauucuuccaccccgugggagaagccgacuacuucgaguaccaccaggagggcgguccagacggcgaacccgacgucccuccuggagccaucgagcagggccccgccgacgacccuggcgagggcccuagcaccggaccuagaggacaaggcgacggcgggaggagaaagaaggggggcugguucgggaagcaccgcgggcaaggcggcagcaacccaaaguucgagaacaucgccgagggguugcgggcccugcucgcccguucccacguggagcggacaaccgacgagggaaccuggguugccgggguauuuguguacggcggcaguaagaccagccuguauaaccucagaagaggaacagcccuggccaucccacagugcaggcugacaccccucucccggcugccauuuggaauggcacccgggccuggaccccagccuggcccacugcgcgagucuaucguguguuacuuuauggucuuccugcaaacccacaucuucgccgagguuuuaaaggaugccaucaaagaccucgugaugacaaagcccgcucccaccugcaauaucagagugaccguaugcagcuuugacgacggcguggaccugccucccugguucccuccuaugguggagggcgccgccgcagaaggggacgacggugacgauggcgaugagggaggggauggagacgaaggcgaggagggccaggagugauaauaggcuggagccucgguggccaugcuucuugccccuugggccuccccccagccccuccuccccuuccugcacccguacccccguggucuuugaauaaagucugagugggcggc

SEQ ID NO: 137 - RNA, 892 nt, Artificial Sequence
  Synthetic Polynucleotide
gggaaauaagagagaaaagaagaguaagaagaaauauaagagccaccaugggccgcagacccuucuuucaccccgugggagaggccgacuauuuugaguaccaccaggagggcgggcccgacggcgaaccugacgugccaccuggcgccauugaacaaggcccagccgacgacccuggggagggcccuagcacagggcccaggggccagggagacggggguaggcguaagaagggaggcugguucgguaagcaccgcggccaggguggcagcaacccuaaauucgagaauauugccgaaggucugcgagcccucuuggccagaagccacguggaacgcacuacugaugagggcaccugggucgccggaguguucguguacggcggaagcaaaaccagucuguacaaccugcgccggggaaccgcucuugccaucccccagugucgccugaccccauuguccagacugccauuuggcauggcccccggccccggcccccagcccggcccccugagggagagcaucgugugcuacuucaugguguuccugcagacccacauauucgcugaggugcugaaggacgccauuaaggaccuggugaugaccaagcccgccccuaccugcaacauccgcgucaccgucuguaguuucgaugacggcguggaucucccaccaugguuuccuccaaugguggagggcgcugcugccgagggggacgacggagacgacggagacgagggcggggacggggacgaaggcgaagaggggcaagagugauaauaggcuggagccucgguggccaugcuucuugccccuugggccuccccccagccccuccuccccuuccugcacccguacccccguggucuuugaauaaagucugagugggcggc

SEQ ID NO: 138 - RNA, 892 nt, Artificial Sequence
  Synthetic Polynucleotide
gggaaauaagagagaaaagaagaguaagaagaaauauaagagccaccaugggacggagaccuuucuuucaccccguaggugaagccgacuacuuugaauaccaccaggagggcggcccagacggcgagcccgacguuccccccggggcuaucgagcaggggccugcggacgacccaggagagggaccuagcacuggaccccgaggucagggcgauggggggcgaagaaagaagggcggcugguucggcaaacauaggggccagggcgggucuaacccaaaguucgagaacauagccgagggccugagagcccugcuggcaagaagccacguggagcgaaccacagaugaaggcaccuggguggccggcguguucguguacgggggcagcaagaccucccuguauaaccucagaagagggaccgcccuggccaucccccagugccgacugaccccccugagcaggcugcccuucggaauggccccuggucccgguccccaaccgggcccgcuucgggaguccauagugugcuacuucaugguguuccugcagacacacaucuucgccgaggugcugaaggaugcaaucaaggaccuggugaugaccaagccagcucccaccugcaacauccgggugaccgugugcagcuuugaugacggcguggaccugccacccugguucccgccuaugguggagggcgcugcagccgagggcgacgacggggacgacggcgacgagggcggagauggcgacgagggcgaggagggccaggagugauaauaggcuggagccucgguggccaugcuucuugccccuugggccuccccccagccccuccuccccuuccugcacccguacccccguggucuuugaauaaagucugagugggcggc

SEQ ID NO: 139 - RNA, 892 nt, Artificial Sequence
  Synthetic Polynucleotide
gggaaauaagagagaaaagaagaguaagaagaaauauaagagccaccaugggcagacggcccuucuuccaccccgugggcgaagcagacuauuuugaguaucaccaggaggggggccccgacggcgagccagacgucccaccuggugcaaucgagcaaggucccgccgacgacccuggggagggccccagcaccggccccagaggccagggggacgggggcaggagaaaaaaggguggcugguucggcaagcacagagggcagggggggagcaacccaaaguucgagaacaucgccgagggcuugagagcacugcuggccagaagccacguggagagaaccaccgaugagggaaccuggguugcuggcguguucgucuacggcggcagcaagaccagccuguacaaccuuagaagaggcaccgcccuggccaucccccagugccgccugacaccgcugagcagacuccccuucggcauggcuccuggccccggcccccagcccgggccccugagagagagcaucgugugcuacuucaugguguuucuucagacgcacaucuucgcugagguccugaaagacgccauuaaggaccuggugaugacaaaaccagcuccgaccugcaacaucagggucacugucuguagcuucgacgauggcguggaucucccucccugguuccccccaaugguggagggcgcugccgcugagggggacgacggcgacgacggggaugaaggcggcgacggcgacgagggggaagagggccaggagugauaauaggcuggagccucgguggccaugcuucuugccccuugggccuccccccagccccuccuccccuuccugcacccguacccccguggucuuugaauaaagucugagugggcggc

SEQ ID NO: 140 - RNA, 1324 nt, Artificial Sequence
  Synthetic Polynucleotide
gggaaauaagagagaaaagaagaguaagaagaaauauaagagccaccauggagcacgaccuggagagggggccaccaggccccaggcgacccccaagaggaccaccacugagcuccagccugggacuggcccuccugcuguugcuccucgcuuuacuguuuuggcuguauauagucaugucugacuggacaggcggggcauuauuggugcucuacagcuuugcacugaugcucauuaucauuauucugauuaucuuuauuuuuagacgggacuugcucuguccauuaggcgcgcuguguauuuugcugcugaugaucacacugcugcugauugcgcuguggaaccuccacggucaggcccuuuuucucggcaucgugcuguuuaucuuugggugccucuuggugcuugggauuuggaucuaccuucucgaaauguuauggcggcucggcgcuacaaucuggcagcuccuggccuucuucuuagcauuuuuucuggaucugauccugcugauaauagcccuguaccuacaacagaacugguggacucugcugguugaccuguuauggcugcuccuguuccucgccauucucauuuggauguacuaccacgggcagcgucauucagacgaacaccaccacgaugauagccugccgcacccucaacaagcuacggaugacuccggacacgaguccgauaguaacuccaacgagggacgccaucacuugcuggucucuggggcuggcgacgggccuccacuguguagccaaaaucugggagcccccggcgggggcccugauaaugggccucaggauccugauaacacggaugauaacggcccacaggauccagauaauaccgacgauaauggaccucaugauccucuuccacaggaucccgacaauacagaugacaaugggccgcaggauccagacaauacugacgauaauggcccacaugauccccugccacacagccccucagacucagcgggaaaugauggcgggcccccacaguuaaccgaggaaguggaaaacaaagggggagaucaggguccuccccucaugacagauggcgggggcggccacagucaugauagugggcacggggguggcgauccacaucuccccacacugcugcuaggcagcuccgguagcgggggagaugaugacgauccccacggcccugugcaguugagcuauuacgacugauaauaggcuggagccucgguggccaugcuucuugccccuugggccuccccccagccccuccuccccuuccugcacccguacccccguggucuuugaauaaagucugagugggcggc

SEQ ID NO: 141 - RNA, 1324 nt, Artificial Sequence
  Synthetic Polynucleotide
gggaaauaagagagaaaagaagaguaagaagaaauauaagagccaccauggagcacgaccuggagcgcgggccuccaggaccccgacggccgcccagggggccaccgcugucauccagucugggccuugcucuguugcuguuacuccuugcccugcuauucugguuguacaucgucaugagcgauuggacagggggugcucugcugguguuguacagcuuugcgcugauguugauuauuaucauccugauuaucuuuauauuucgaagggaccuccuuuguccccugggagcgcugugcauacugcucuuaaugaucacguugcuccucauugcuuuauggaaucugcacggacaggcucuauuccucggcaucguuuuauucauuuucgggugccuccuugugcugggaaucuggaucuaucugcuagagaugcuguggcggcucggcgccaccauuuggcagcuucuggcauuuuuccuagcguuuuuucuggaucucauccuacuuauuaucgccuuguauuugcagcagaacugguggacucuccugguggaucuccuguggcuccuccuguuccucgccauauugauauggauguacuaccacggacagcgccacagcgacgagcaccaccacgaugauagucugccucacccucaacaggcuacagaugacucaggccacgaaagcgauuccaacucaaaugaaggccggcaccacuuguugguguccggagccggcgacgggccaccacucugcagccagaaucugggcgcucccggcggagguccagacaaugggccacaggacccugauaacacggaugauaacggaccgcaggauccugacaauacagaugacaacggcccgcaugauccacugccucaggauccugauaauacugacgauaacggaccccaggauccugauaacaccgacgacaacgggccucacgauccccuaccccauuccccaucugacucugcuggcaacgauggcggcccaccgcagcugaccgaagagguagaaaacaagggcggggaucagggcccuccacugaugacagacggcggcgggggacacucccaugauucgggccaugggggaggggauccucaccuucccacacucuugcugggaaguagcggguccggcggggacgaugaugauccccaugguccaguccaguugucauauuacgauugauaauaggcuggagccucgguggccaugcuucuugccccuugggccuccccccagccccuccuccccuuccugcacccguacccccguggucuuugaauaaagucugagugggcggc

SEQ ID NO: 142 - RNA, 1324 nt, Artificial Sequence
  Synthetic Polynucleotide
gggaaauaagagagaaaagaagaguaagaagaaauauaagagccaccauggagcacgaccuugagcgggguccaccaggcccacggcgcccuccgcgcgggccuccuuugucauccucccugggacuggcacugcugcuguugcuucuggcccugcuguucuggcuguacaucguuaugucugauuggacaggaggagcucugcugguucuuuacucuuucgcgcugaugcugaucaucaucaucuugaucauuuucauuuucagacgagaccuccuuuguccucucggagcccuguguauccuccugcugaugauaacccuucugcugauugcuuuguggaaucugcaugggcaagcucuguuucuuggaauugucuuauuuauuuuugggugucugcugguguugggaaucuggaucuaucuucuugaaaugcuguggcggcugggcgccacaaucuggcagcuacucgccuuuuuccuagcuuucuuuuuggaucugauucugcugauuauugcucucuaccugcagcagaauugguggacccucuuagucgaucugcuguggcuguugcucuuucucgccauccugauuuggauguacuaucaugggcagcgccauagugaugaacaucaucacgaugauucccugccacauccucagcaggccacagaugauucaggccacgaaucagacagcaauagcaaugagggccgccaccaccugcugguuucaggggccggugacggcccuccauugugcagucagaaccugggagccccgggggguggaccugauaacgggccgcaggauccugacaauacugaugacaacggaccccaggauccagauaacacugacgacaauggcccccaugacccccuaccccaggaucccgacaauacagacgacaacggaccgcaggaccccgacaacacugaugauaaugggccacacgauccucugccucacucuccaucagacucugccggaaaugacgguggaccgccacaguuaacugaagaagucgaaaacaagggcggcgaucaggggccgccgcucaugacagauggcgggggaggucacagccacgauagcggacacggaggaggugacccucaucugccuacacuucuguuggguagcucugggagugggggggaugacgacgacccucacggaccuguucagcucucauacuacgacugauaauaggcuggagccucgguggccaugcuucuugccccuugggccuccccccagccccuccuccccuuccugcacccguacccccguggucuuugaauaaagucugagugggcggc

SEQ ID NO: 143 - RNA, 1324 nt, Artificial Sequence
  Synthetic Polynucleotide
gggaaauaagagagaaaagaagaguaagaagaaauauaagagccaccauggaacacgaucuugaacgggggccgccgggaccgaggaggccgccacgggggcccccccugagcaguagcuuggggcuugcgcugcuucuccugcuguuggcccuccuguuuuggcuguauauugugauguccgacuggaccggcggcgcccugcucguccuguauagcuuugcuuugaugcugauaauuauuauauugaucaucuuuauuuuccggcgugauuugcucuguccucuuggugcccuuuguauccugcuguuaaugaucacucugcuccucauugcccuauggaaccuccacggacaagcccuguuucuuggcaucguucucuuuauauucggaugccucuuagugcuugggaucuggauauaccuguuggaaaugcuguggaggcuuggagccacgauauggcaauuauuggcauucuuucuggccuucuuccuggaucugauccuguugauaauugcucuguaccugcagcagaacugguggacacuacuuguugaccugcucuggcuacuccuguuccuugcgauccugauuuggauguacuaucacggacagagacacuccgacgagcaucaucacgacgauuccuuaccacacccucagcaggcgacagaugauucuggccaugagagcgauuccaacagcaacgagggccggcaccauuugcuggugucgggggcuggagacgggccuccguuauguagccaaaacuugggcgcgcccggcggcgggcccgauaacggcccgcaggacccggacaauaccgacgauaaugggccucaagaucccgacaauacugaugacaauggaccacacgauccucugccacaggaucccgacaacacagaugacaaugggccgcaagaccccgacaauacagacgauaauggcccccacgacccacuaccacauucucccucugacagugcggggaaugaugguggucccccacaacugaccgaggagguggagaauaaggggggggaccaagguccaccccucaugacugauggaggaggaggacacucgcacgauucaggucacggcgggggggacccucacuugcccacucugcugcugggcagcagcgguucugggggcgacgaugaugauccccacggcccggugcagcuaaguuauuacgacugauaauaggcuggagccucgguggccaugcuucuugccccuugggccuccccccagccccuccuccccuuccugcacccguacccccguggucuuugaauaaagucugagugggcggc

SEQ ID NO: 144 - RNA, 1324 nt, Artificial Sequence
  Synthetic Polynucleotide
gggaaauaagagagaaaagaagaguaagaagaaauauaagagccaccauggagcacgauuuagagaggggcccaccuggccccaggcgcccaccuagaggcccacccuugucgucgucauuagggcuggcauugcuccugcuccuccuggccuugcuguucuggcuuuacaucgugaugagcgacuggacuggcggggcccugcugguccucuauagcuuugcacugaugcugauuauaaucauauugaucaucuucaucuuccgacgggauuuacuuugcccccugggggcauuauguauucuauugcugaugauaacacuucugcuuauugcuuuauggaaucuacacggucaggcucuuuuucugggaaucgugcucuuuaucuuuggaugccuucugguacuaggaauuuggauauaccucuuagaaaugcuguggcggcucggcgcaaccaucuggcaacuccuugcguuuuuucucgcguuuuuccucgaccugauucugcuaauaaucgccuuauaccuucagcagaauugguggacacuccugguggaccugcuguggcuccugcuauuccuugcaauccucauuuggauguauuaccauggccagaggcacucugaugagcaccaccacgaugauagucuaccucauccacagcaggcuacggacgauucagggcaugagucagauucuaauuccaacgaaggaagacaccaucuguuggugucaggggccggagacggccccccucuguguagccagaaccucggggcaccagggggagguccugacaaugggccgcaagacccugacaauacugaugauaauggcccccaagauccugacaauaccgaugacaacggcccgcacgacccccugccgcaggauccggauaacaccgacgacaauggaccccaggaccccgauaacacggacgauaacggcccucacgaucccuuaccccauucuccguccgacucugcagggaacgacgggggcccuccucaguuaaccgaagaggucgaaaauaaggggggagaccagggccccccauuaaugacagacgggggcggcggucacagucacgacucaggucacggcggcggggacccccauuugccuacacugcuguuagggucuucuggcucaggcggggacgaugaugauccacacgguccggugcagcugucauauuaugauugauaauaggcuggagccucgguggccaugcuucuugccccuugggccuccccccagccccuccuccccuuccugcacccguacccccguggucuuugaauaaagucugagugggcggc

SEQ ID NO: 145 - RNA, 1657 nt, Artificial Sequence
  Synthetic Polynucleotide
gggaaauaagagagaaaagaagaguaagaagaaauauaagagccaccauggguagucuugagaugguaccaaugggcgcagguccaccgagcccuggaggcgauccugacggguacgacgggggaaauaacucgcaauaucccucagccucaggcucaucggguaauacuccgaccccuccaaacgacgaggaaagggaauccaaugaggaaccgccuccaccauaugaggauccguacugggggaacggugauaggcacagugacuaccagccacuugggacacaagaccaaagccuguaccucggacuucagcacgaugguaacgacgguuugccgccucccccuuauagcccuagagaugauagcucccagcauauauacgaggaggcugguaggggcuccaugaauccaguaugcuugcccguuaucguagcccccuaccucuucuggcuugcggcgaucgcagcuagcuguuuuacagcuuccgugagcacagucguaaccgcgacaggacuggcacugucucuacuccucuuggcagcgguugccagcagcuacgccgccgcucagcggaaacugcucaccccuguuacagucuuaacugcaguugugaccuucuucgccauuuguuugacauggaggaucgaagauccuccauuuaauagucuccuguuugcacugcuggccgcugcgggcgggcuacaagggauauaugugcuaguaaugcucguccuacuuauucuggccuauaggcggagguggcggcgccugacagugugcggagggauaauguuccuagccugugugcucgugcucauuguggacgcuguucuacaguugucuccucugcugggugcagugacgguggucucaaugacccugcuguuacuugccuucgugcuuugguugucaucuccagggggacugggcacacugggcgccgcccuguuaacccuggcggccgcucuggcacuccuggccucacugauucugggaacucugaaucucaccacuauguuucuucugauguuauuguggacuuuggugguguugcugauuugcagcuccugcaguucuugcccccuauccaaaauauuacuggcgcggcuguuccuuuaugcccucgccuuacugcugcucgcuagcgccuuaauugcugggggcuccauucuucagaccaacuuuaaaucccuguccagcacugaauucauccccaaccuuuuuugcaugcugcuccuaaucguggcugggauucuguuuauucuggccauuuugaccgaguggggcaguggcaacaggaccuacggcccuguguucaugugucugggggggcucuuaacgauggucgcuggcgcugucuggcucacggugaugaguaacacuuugcucagcgcguggauccugacagccggcuuucucauuuuucugauuggguucgcuuuguuuggagucauucgguguugccgcuauugcuguuacuauuguuugacauuggaguccgaggagaggccacccacccccuaccgaaauacgguaugauaauaggcuggagccucgguggccaugcuucuugccccuugggccuccccccagccccuccuccccuuccugcacccguacccccguggucuuugaauaaagucugagugggcggc

SEQ ID NO: 146 - RNA, 1657 nt, Artificial Sequence
  Synthetic Polynucleotide
gggaaauaagagagaaaagaagaguaagaagaaauauaagagccaccaugggauccuuggaaauggugcccaugggagccggaccccccucaccagggggagacccagacggauacgacgggggaaacaauucucaguauccgagcgcguccggcagcucaggaaacacacccaccccccccaacgacgaggagagagaauccaacgaggagccuccucccccauacgaagacccuuacugggggaauggagaccgucauucugacuaucaaccucuaggcacucaggaccagucucuuuaccuaggguuacaacacgaugguaaugauggguugcccccgccgcccuauaguccccgggacgacaguagucagcauauauaugaggaagccggcagagguucuaugaaucccguuugucuaccggucauugucgcccccuauuuauucuggcuugcagccaucgccgcuucgugcuucaccgccuccguguccacgguggugacagcuacagggcuggcacucucucugcuacuccuggcugcuguggccagcuccuacgcagcggcucagcggaagcuucucacuccuguaacuguccucaccgcgguagugaccuuuuuugccauaugccugacauggaggauugaggacccacccuuuaauucucugcuguuugcgcuuuuggccgcugccggaggacugcaagguauuuaugugcugguaauguugguucuacuuauucucgcauaccggcgacgguggcggaggcugacuguaugcggggggauuauguuccuggcguguguucugguuuugaucgucgaugccgugcugcaguugucaccgcugcucggggcggucaccguugugaguaugacacugcuucugcuggcuuucgugcucuggcuaucuucccccggggggcuggggaccuugggcgcugcgcuucugacucuggcagcugcucuggcccugcuggccucucuuauucuuggcacacugaauuugacuaccauguuccucuugauguugcuguggaccuuaguugugcugcugaucuguucuuccuguagcagcuguccacuguccaagauucuccuggccagguuguuucuguaugcccuagcgcugcugcuguuagcuucugcucugauagccggcggcaguauccugcaaaccaacuucaagagccucuccagcacagaauucaucccuaaucucuuuugcaugcuacugcucaucguggcaggcauacuguucauucuugcuauccugacugaauggggcucuggcaauagaacauacgggccaguguucaugugcuugggcggccuguugacaaugguugcuggagccguguggcugacgguaauguccaacacucugcugagcgcauggaucuuaacagccggauuccugaucuuuuuaaucggauucgcacucuucggagugauccggugcuguagguauuguuguuauuacugccugacacucgagucggaagagaggcccccuacaccuuaccggaauacaguuugauaauaggcuggagccucgguggccaugcuucuugccccuugggccuccccccagccccuccuccccuuccugcacccguacccccguggucuuugaauaaagucugagugggcggc

SEQ ID NO: 147 - RNA, 1657 nt, Artificial Sequence
  Synthetic Polynucleotide
gggaaauaagagagaaaagaagaguaagaagaaauauaagagccaccauggggucguuggagaugguccccaugggcgcugguccuccaagccccggcggggacccggacggauacgacgggggcaauaauagucaguauccgagugcaagcggaagcagugggaauacgccuacaccaccaaacgacgaggagcgggagucuaacgaggagccuccacccccuuacgaggauccuuacugggggaacggagaucgacauucugacuaccagccuuuagggacacaggaucagucucucuaucucggacugcagcaugauggcaacgacggacugcccccaccaccuuauucuccacgcgacgacagcucacagcacauauacgaagaggccgggcgcgggucuaugaacccgguuugccugccagucaucgucgcacccuaccucuuuuggcuggcggccauugccgcguccuguuucacagccucagugucgacugugguaaccgcaacagggcucgcacucagccuacugcugcucgcugccgucgcguccucuuaugcugcugcccagcgcaaacugcucaccccaguuacggugcucacugcuguuguuaccuuuuucgcuauuugucucaccuggagaaucgaagacccgccguucaacagucuguuauuugcccucuuggcugcagcaggcggccuucagggcaucuauguccuggugaugcugguccugcucauccuggcuuacaggagaagauggcgucggcugaccgugugugguggcaucauguuucucgcguguguucuggugcucaucgucgaugccgugcuacagcugagcccacugcuuggagccgugacagucguuagcaugacacuccugcuauuggcuuucgugcucuggcugaguagcccaggugggcucggcacacuuggugccgcgcuuuuaacacuggccgcggcccucgcacugcuggccucucuaauucucggaacauugaaccugacaaccauguuccuccugaugcuccucuggacacuggugguacuguuaaucuguagcucuugcucaucaugcccacugagcaagauacuccuggcgagacuuuuccuauacgcccuggcccugcugcuguuggcaucggcucugaucgcugggggaagcauccuucaaacaaauuucaagagccuuagcaguacugaguuuauaccuaaccuguucuguaugcuucugcugauagucgcugggauacuuuuuauucuggcaauccuaacagagugggggucagguaacaggaccuaugggccuguuuuuaugugccucggaggccuccucaccaugguugccggcgcaguuugguugacagugauguccaacacccuacugagugcuuggauacugacggccggguuccugauuuuccuaauaggauuugcccuguuugggguuauccggugcugccguuacugcugcuacuauuguuugacccuugagucugaagaaaggccgcccacccccuacagaaacacuguaugauaauaggcuggagccucgguggccaugcuucuugccccuugggccuccccccagccccuccuccccuuccugcacccguacccccguggucuuugaauaaagucugagugggcggc

SEQ ID NO: 148 - RNA, 1657 nt, Artificial Sequence
  Synthetic Polynucleotide
gggaaauaagagagaaaagaagaguaagaagaaauauaagagccaccauggggucauuggagauggugccuaugggggccggcccacccagcccagggggcgauccugacggauacgacgggggcaauaauucacaauauccuagcgccagcggaucuucugggaauacccccacaccaccuaacgacgaggaacgggagucaaacgaggaacccccaccgccguacgaggacccauacugggggaacggggaucgacacucagacuaccagccucucggaacgcaggaucaaagccuguaccugggacugcagcacgaugguaacgauggacugccaccaccuccuuacaguccaagggaugacuccagccagcacauuuaugaagaagccggccgagguaguaugaauccagugugucugcccgugauugucgccccuuaucucuuuuggcuggccgccauugccgccagcuguuucaccgcgucgguuucaaccguagugaccgccacaggccuggcucucagcuuguuacuguuggccgcuguggcgagcuccuacgccgccgcccagcgcaagcuacuuaccccugugacagugcugacggcggugguuacauucuucgccauuugccugaccuggcgaauugaggauccaccauucaauuccuuauuguuugcccuccucgccgcugcuggagggcuccaggguaucuacgugcuggugaugcucguuuugcugauauuggcuuaccggcggcgcuggcgccgccuuaccgucugcggaggaaucauguuuuuggcaugcgugcucguucucauuguggaugcuguuuugcagcugucaccccuguugggugccgugacaguuguaaguaugacccugcuccugcucgcauucgugcucuggcugagcucucccggggggcugggcacucucggagcagcucugcugacacuagccgcagcacuagcccuucuggccagucuuauccucggaacgcugaaccugacgaccauguuccuccugauguugcucuggacccucguagugcuguuaauaugcucuagcuguagcuccugcccucugagcaagauucuccuugcuaggcuguuccuauacgcccucgcucuccuauugcuggcgagcgcucucaucgccggugggagcauccugcagacuaacuucaagucccugaguucaacagaauucauucccaaccucuuuuguaugcugcugcuuaucguggccggcauccucuuuauccucgccaucuugacugaguggggguccggaaaucgcacauauggcccaguuuucaugugucuggggggccugcucacgaugguggccggcgcaguguggcugacgguaaugucaaacacuuugcucucugcguggaucuugaccgcaggcuuccugaucuuuuugaucggcuucgcccuguucggugucauccggugcugcagauacugcugcuacuauugccucacacucgaauccgaagagaggccucccacaccuuaccgaaauacagugugauaauaggcuggagccucgguggccaugcuucuugccccuugggccuccccccagccccuccuccccuuccugcacccguacccccguggucuuugaauaaagucugagugggcggc

SEQ ID NO: 149 - RNA, 1657 nt, Artificial Sequence
  Synthetic Polynucleotide
gggaaauaagagagaaaagaagaguaagaagaaauauaagagccaccauggggucuuuagaaaugguccccaugggugccggcccacccucgccaggaggcgauccagacggcuacgacgggggaaacaacagccaguaccccagcgccagcgguagcagcggcaacaccccgaccccaccaaacgacgaagagcgggagagcaaugaggagcccccaccccccuaugaggacccuuacuggggaaauggcgaucgacacagcgauuaccagccccugggcacacaggaucagagccuguaccugggcuugcagcaugaugguaacgacgggcuuccgcccccaccauacucacccagagacgauucaagucagcacaucuacgaggaggcugguagggguaguaugaauccugugugucucccugugaucgucgcccccuaccuauuuugguuagcugcgaucgcugccuccugcuucaccgcuagcgugucaacagugguuacggcaaccgggcuggcguuaagucugcuucugcuugcggcaguggcaucuucuuaugcagcggcccagcggaagcuuuugaccccugugacaguacugaccgcagugguuacguuuuuugcgauuugcuugacguggagaauagaggaucccccuuuuaacucacugcucuuugcacugcucgcggcugcugggggccugcaggggauuuacguccucguuaugcuggugcuccugaucuuagccuacagaaggagauggcgccgacugacaguaugcggggggauuauguuuuuggcauguguacucguauugaucguggaugccgucuugcagcuuuccccccugcugggcgcagucaccgucgugaguaugacucugcuguuacuggccuucguacuguggcuuagcagcccuggaggacuaggcacgcugggcgccgcuuuauugacccuggcagccgcccuggcucugcuggccucccugauacuggggacauuaaauuuaacaacuauguuucugcugaugcugcuguggacucuaguugugcucuugauauguuccuccuguuccagcugcccucugagcaagauccuguuggcucggcuauuccuguacgcgcuggcucuccuccugcuagcuucagcgcuaauugcaggcgggucuauucuccagacgaauuuuaagagccucaguagcacugaguuuaucccgaaucuguucugcauguugcuauugaucgucgcaggcauucucuucauucuggccauacuuacagagugggguagcggcaaccggacuuauggcccuguguucaugugcuuggggggccuucucacaaugguggcaggggcgguauggcugaccgugaugucuaacaccuuguuaucagccuggauccuuaccgccggcuuccuaauuuuucugaucggcuucgcccucuucggaguaauacgaugcugucgguacugcugcuacuauugccuuacuuuggagagcgaagagcggccucccacucccuauagaaacaccguuugauaauaggcuggagccucgguggccaugcuucuugccccuugggccuccccccagccccuccuccccuuccugcacccguacccccguggucuuugaauaaagucugagugggcggc

SEQ ID NO: 150 - RNA, 2761 nt, Artificial Sequence
  Synthetic Polynucleotide
gggaaauaagagagaaaagaagaguaagaagaaauauaagagccaccauggaggcagcacugcuggucugccaguauacaauccagucgcucauucaucugacaggcgaggaccccggcuucuuuaacguggaaaucccagaguucccuuucuauccaaccuguaacguuugcacugcugacgugaacgugacaaucaauuucgacgugggaggaaagaagcaucagcuugaucuggauuucggccaacugacgccacacaccaaagcgguguaccaaccaaggggugcauuuggagggagcgagaaugcuacaaaucuguuuuuacuggaacugcuuggugcaggagagcuggcacuaaccaugcgaagcaagaagcuccccaucaacguuaccaccggggaagaacagcaagucagccuugaauccguggauguguacuuucaggauguuuucggcaccauguggugucaccacgcugagaugcagaaucccguguaucucauacccgagacuguacccuacaucaagugggauaauugcaauucaacuaauauuacggcuguggugagggcccagggcuuggacgugacucugcccuuaucucuaccuacuucugcccaagacuccaauuuuucugucaagaccgagaugcucgggaaugagaucgauaucgagugcaucauggaggacggugagauaagccagguucugcccggcgacaacaaguucaauaucacuuguucuggcuacgagucccaugugccuagugguggcauacucacaaguacuucucccguagccacccccauucccggaaccggauacgccuacagucugcgucugaccccacggccuguguccagauuccuggguaacaauaguaucuuauacguguuuuauagcggaaacggcccuaaagcguccggaggggacuauuguauucagaguaauaucguuuucucugaugagauuccugccagucaggacaugccgacaaacacaacugauauuaccuacgugggcgacaaugccacguauucagugcccauggucacgagcgaggacgccaauucaccaaauguuacuguaacagcuuuuugggccuggccaaauaacacugagacugacuucaaauguaaguggacuuugaccucuggaacuccgucggguugcgagaauaucagcggggccuuugcuuccaacaggacuuucgacaucacugucucagggcuggggacagcaccgaaaacauuaaucauaacacggaccgccaccaacgccacgacuacaacccauaaggugaucuuuuccaaggcaccugaguccaccacuaccuccccgacucuuaacacuacgggcuucgcugaucccaacaccacuacgggguugccuagcucgacacaugugccgacgaaccugacugccccugcaucgaccgggcccacaguuucgaccgccgaugugacaucaccaacccccgcagguacaaccucaggcgccagcccagugaccccuuccccaagccccugggauaauggaacggaguccaaggcuccugauaugacuuccucuaccagccccgugacuacacccacucccaacgcaacuagcccaaccccagcugugacgacccccaccccgaacgcgacaucucccacaccugcugugacaaccccaaccccuaacgccacuagcccuacccuagguaagaccaguccgacuagcgccguuacaaccccuaccccuaacgcaaccggcccgaccgugggcgagacuuccccgcaagccaaugcgacaaaucacacauugggcgggaccucuccuacaccagucguuacaucucagccuaagaacgcuaccuccgcugucacuaccggacagcacaacaucaccagcucaagcacgaguuccaugagcuugcggccgagcucaaaucccgagacccuaucaccauccacaucagacaacaguacuucacacaugccacucuugacgagcgcucaccccaccggcggcgagaacaucacccaggugacuccggcgucuauuuccacccaccacgucagcacgucgucucccgcaccgagaccagggacgacuucucaggccagugggccuggcaacuccucuacaagcacaaaaccaggcgaaguuaacgugacaaaaggaacgcccccccagaacgcaaccaguccucaggcccccagcgggcagaaaacugcggugccaacugugaccagcaccgguggcaaggccaacucaacaacuggaggcaagcauacgacggggcacggcgcccggaccuccacugaacccacgaccgauuacggaggugacagcacaacaccgcggccacgauauaaugccaccacuuaucugccaccauccacaagcuccaagcugcggccacgguggaccuucacaagcccacccgugacgacugcccaagcgacggugccagugcccccuacaagccagccacgcuucuccaaccuuaguaugcucguucuccagugggccagccuugcuguucugacccuccuccugcugcucgugauggccgauugcgccuuuaggagaaaccucagcacuagccacacguacaccacgccccccuacgaugacgccgagacuuacgucugauaauaggcuggagccucgguggccaugcuucuugccccuugggccuccccccagccccuccuccccuuccugcacccguacccccguggucuuugaauaaagucugagugggcggc

SEQ ID NO: 151 - RNA, 2761 nt, Artificial Sequence
  Synthetic Polynucleotide
gggaaauaagagagaaaagaagaguaagaagaaauauaagagccaccauggaggcugcucuauuggugugccaauacaccauucagucgcugauccacuugacuggggaggaucccggauuuuucaacguggagauuccggaauucccuuuuuaccccaccugcaacgugugcacugccgacguaaacgugaccauaaacuuugacgucggugggaagaagcaccagcuggaccuggacuucgggcaguuaacaccccacacaaaggcaguuuaccagcccagaggagccuucggcggaucggagaaugcaacaaaucuuuuccugcuagaacugcucggcgccggcgaguuggcccugacaaugagaagcaagaaacuuccuaucaacguaaccacaggggaggagcagcaggucagccucgaaaguguugacgucuauuuccaggaugucuuugggacuauguggugccaucacgccgaaaugcagaaucccguguaccucauucccgagacaguacccuauaucaagugggacaacugcaacucuacuaauauuacagccguggugcgcgcucagggacuugauguaacauugccuuugucuuugcccacaagcgcucaggauucuaauuucucuguaaagacggagaugcuggggaaugaaaucgacauagaauguauuauggaagacggugaaaucagucaggugcuaccgggagacaacaaauucaauauuacauguucuggcuaugagagccacgugccgagcgggggcauccugacuucgacuucucccgucgccacacccauaccaggcacaggcuacgcuuauagucugaggcugacucccaggccaguaucccgauuucuggguaauaauuccauccuuuauguguuuuacuccgguaacggccccaaagcuucggggggcgacuauuguauccagucuaauauaguguucuccgaugagauucccgcgagucaggauaugcccaccaacaccaccgacaucacguauguuggggauaacgcuaccuauagugugccgauggugacauccgaggacgcaaacucuccuaacguaaccgugaccgccuuuugggcauggccaaauaauaccgaaaccgauuuuaaaugcaaguggacccugacauccgggacucccuccggaugcgaaaauauuucuggagcuuuugccagcaaucggaccuuugauaucacugugagugguuuaggcaccgccccaaaaacacugaucauaaccaggacagccacaaaugcgaccacaacuacacacaaaguuauauuuaguaaagcaccugaguccaccacaacuucuccgacccucaacacuaccggcuucgcugauccgaauaccaccacaggucuuccaucuuccacccacguuccaacuaaucuuacggcgccugcuagcaccgguccaaccguguccaccgccgaugugacuagccccacgccggcuggaacaacaucaggggccagcccuguaaccccaagcccuucacccugggacaaugguaccgagaguaaggcgcccgacaugaccucaucaacuucuccuguuacaacuccaacaccaaaugccacuaguccuacccccgcagucacuaccccaacgccuaaugcaacgucaccaacuccugcagugaccacaccaacacccaaugcuacuucgccgacccugggcaagaccagcccaaccagugccgugacgacaccgacuccaaaugcgaccggaccuacugucggugagacaagcccccaggcaaacgcgaccaaccacacccucggcgggacuucuccaacacccgucguaacgucccaaccaaaaaaugcuacaucggccgugacuaccggacagcauaauaucaccucaagcuccacgucgucaaugagccugcggccgucaaguaauccagagacucugucgccaucuaccucagauaacucaacuagccacaugccucuacucacuagugcccaccccaccggcggggagaacaucacgcagguaacaccagcgucuaucaguacucaccaugugaguaccagcucccccgcuccucgaccgggaaccacgagccaggccagcggaccggguaauaguagcacuucuacuaaaccgggagaggucaaugugacuaaggggacucccccccaaaacgcuaccagcccacaggcucccucagggcagaagaccgcuguuccaacaguuacaucuacugggggcaaggcaaauagcacaaccgguggcaagcauacuacugggcacggugcccgcacaagcaccgagccuacaacggacuaugggggggauucuaccacaccacguccccgguauaacgccaccacguaucuuccgccuagcacaucaagcaaacucagaccucgcuggacauuuacaucacccccaguuaccacugcucaggcaaccgucccggugccuccuacuucacaaccacguuucagcaacuugagcaugcugguccugcagugggcuucccucgccgugcugacauuacuguuauugcuggugauggccgauugcgcguuucgcaggaaccugucuaccagccacacauacacaacgcccccguaugacgacgcagagacuuaugugugauaauaggcuggagccucgguggccaugcuucuugccccuugggccuccccccagccccuccuccccuuccugcacccguacccccguggucuuugaauaaagucugagugggcggc

SEQ ID NO: 152 - RNA, 2761 nt, Artificial Sequence
  Synthetic Polynucleotide
gggaaauaagagagaaaagaagaguaagaagaaauauaagagccaccauggaagccgcucuucuggucugccaguauacaauccagucgcugauucaucucaccggcgaggauccagguuucuuuaacguggagauuccagaauucccuuucuauccaacuuguaacguguguacugccgacguuaacguuacuauuaacuuugacgugggcggaaagaagcaccagcuggaucuugauuucggccagcuaacaccucauaccaaggccgucuaccaaccacgcggggcauuuggcgguucugagaaugcuacaaaccuguuccuuuuggaacuccucggagcaggggaacuggcacuuacaaugaggaguaagaagcugcccaucaacgucaccacgggggaagaacagcaggugucccuggaguccguugauguguauuuccaggacguuuucgggacaauguggugucaucaugccgaaaugcagaauccgguguaucucauuccugagaccgugcccuauauuaaaugggauaacuguaauucgacaaacauaacugccguagugcgugcccagggucuggauguaacuuugccucucucccuucccacuucugcccaggacuccaauuuuucagugaagaccgaaaugcuugggaacgagaucgacaucgaguguaucauggaggauggggagaucagucagguguugccuggugacaauaaguuuaauauaacauguuccggcuaugaaucacauguuccaagcggagguauucucacaaguacaucucccguagccacgccgauuccgggaaccggauacgccuauucacuucggcugacuccucggccagugucacgauuccugggcaauaacucaauucuguacgucuuuuacagcggcaacggcccaaaggccaguggaggcgauuacuguauccagucuaacaucguauuuucagaugagauuccagcaagccaagacaugccaacuaauacuacagacauuacauacgucggugauaacgccacuuauucagucccuauggucacauccgaggacgcgaacucacccaauguuaccguuaccgcauucugggcauggcccaauaauacggaaacagacuucaaauguaaguggacccugaccaguggcaccccuucuggcugcgaaaauauaagcggggcauuugcuagcaacagaacauucgauauuacugugucuggccuggggaccgcccccaaaacacucauuauaacgcgaacagcuacgaacgcuaccacaaccacacauaaagugauuuucagcaaggcuccagaaucaacuacaaccaguccgacccuuaauaccacaggcuucgcagacccgaacacaacgacgggacugcccuccucaacgcaugugccgacuaaucugacugcucccgcaaguaccggcccaacagucuccacagcagacgucaccucuccgacucccgccggcacuacaucuggagccucaccggugacuccuaguccuucccccugggacaaugggaccgagucuaaagccccggacaugacgaguucuaccucaccaguuacaaccccaacaccuaaugccacaagcccuacgccagccgugaccaccccuacccccaaugccaccagcccaacacccgcuguuacaacgccaacccccaacgcuacuucuccaacgcuaggaaaaacaucacccaccucagcuguaaccacccccacaccaaacgcuaccgggccaaccguuggcgaaaccuccccccaggccaaugcgacaaaccacacccuuggggggacuucucccacuccuguggugacuucacaaccgaagaacgcgacgucggccguuacgaccgggcagcacaauaucaccucguccuccacgucguccauguccuugcggccuuccaguaacccagagacacugucuccuaguaccagugacaacagcaccucucacaugccauuacugacuuccgcccacccaaccggcggagagaacaucacucaggugacccccgcaucuauuucuacccaccacgugagcacuagcagcccggcaccaagaccagggaccaccucccaggcuagcggcccgggcaacuccuccacuagcacgaaaccaggagaggugaacgugaccaagggcacaccgccacagaaugcaacuuccccacaggcccccuccggccagaaaacugcuguaccuacggucacuagcacuggcggaaaagcgaauucaaccaccggugguaagcauaccaccggacacggcgcucggacuagcacagagccaaccacugauuacgggggugacucaacgaccccgaggcccagguacaacgcaaccaccuaucucccaccauccacaucuuccaagcucaggccucguuggacuuucaccuccccgccugugacuacagcgcaggccacagugccagugccuccaacgucacagccgcgguuuagcaaucucuccaugcugguccugcagugggcaucucuggcaguccugacacugcuucuuuugcucgugauggccgauugugcguuuagacgcaaccuuucaacaucccacacauauacaacuccacccuaugaugacgcagagacuuaugugugauaauaggcuggagccucgguggccaugcuucuugccccuugggccuccccccagccccuccuccccuuccugcacccguacccccguggucuuugaauaaagucugagugggcggc

SEQ ID NO: 153 - RNA, 2761 nt, Artificial Sequence
  Synthetic Polynucleotide
gggaaauaagagagaaaagaagaguaagaagaaauauaagagccaccauggaagccgcccuauuagucugccaguacaccauucaaagccucauccacuugacuggggaggauccuggguucuuuaacguggaaaucccggaauucccuuucuacccaacuugcaacgugugcacggcugacgucaacgugacuaucaacuucgaugugggggggaagaaacaucaacuugaucuggacuuuggccagcuuacuccccacaccaaggccguguaccagccccgcggcgcauucggugggagcgagaacgcgacaaaucuauucuugcuggaacugcugggcgcaggagagcucgcccugacgaugcgaucuaaaaagcuucccaucaacguuaccacuggcgaggagcagcaggugucccucgaaagcgucgacgucuauuuccaagacgucuucggaacaauguggugccaccacgcugagaugcagaaccccguauaucuuauucccgaaaccgugccauacaucaagugggacaacugcaacucaacuaacaucacugcaguagugcgcgcccagggacuggacgucacuuugccacugucacugcccacaucagcccaagacagcaacuucagcgucaagacagaaaugcugggcaacgaaaucgacaucgaaugcauaauggaggauggggaaauuucccagguccuccccggugauaacaaguuuaauauuacuuguucuggauaugaaucccaugugccgucuggugguauacugacgaguacaucgccaguggcuaccccaauccccgggacaggcuaugccuacagccugagacugacgccaagaccaguuuccagguuucuggggaauaacucuauccuguauguguuuuauucugguaacggacccaaggcauccggcggugauuauuguauccagagcaauauaguguucucugaugagauuccggccucccaggauaugccaaccaacacgacagauaucaccuaugucggggacaacgccacauauagcgugccaauggugaccagcgaagaugccaauucucccaacgucacagugacagccuuuugggcguggccuaauaacacagaaacugacuuuaaaugcaaauggacucuaaccucaggcaccccaucuggcugcgagaacauaagcggcgcguuugcaucgaacagaacuuuugauauuacaguaucuggguugggcacugcccccaaaacucuaauaauuacacggacggccacuaacgccaccacgacgacucacaaggugaucuucagcaaagcucccgaaucuacuacuaccucgccgacacugaauacgacaggauucgccgacccaaauacuacgaccggccuucccagcucgacacaugugccuacaaacuuaacggcccccgccaguaccggccccaccgugagcaccgcugacgucaccucuccuaccccugccgggacuacaaguggugcuuccccaguuacucccagcccuagcccuugggacaacggcacugagagcaaagcuccggacaugaccagcaguaccaguccagugacaacuccgacacccaaugcgacguccccaacucccgccgugaccacgccaacaccaaaugccacgucaccuacuccagcggucaccaccccaacgccaaacgcuacuagucccacucuaggcaagacaucucccaccuccgcugucaccaccccuacacccaaugcuaccggucccacggugggugagacuagcccacaggccaacgcaacuaaucauacauuggggggcacaagcccaacccccgucgucacuagccagccuaaaaacgccacaagcgcuguaacuaccggccagcacaauauaacaaguuccaguacuagcaguaugucucugagacccagcucaaauccugaaacccucucccccucuacgucggauaacuccacgucccacaugccucuacucacaagcgcgcacccuaccgggggagaaaauaucacucagguuaccccagcuucuaucucgacucaccaugucucuacuucuuccccagcgccacggcccggcacuaccagccaggcuagcgggccagguaauuccuccacuagcacuaaaccuggcgaagucaacguuaccaagggaacacccccccagaaugcaaccuccccccaagcucccucuggacagaaaacagccgucccuaccgucacaagcaccggugggaaggcgaauucuacgacaggcgggaagcacacuaccggacacggagcaaggacauccacugagcccacgaccgacuacgguggcgacuccaccacccccagacccagguacaaugcgacuaccuaccugcccccuuccacuuccagcaaacugaggccucguuggacuuucacuucucccccagucaccaccgcucaggcuaccgugccugucccgccgaccucucagccccgguuuucaaauuugaguaugcucgugcugcagugggccagccuggcagugcuuacccuccugcucuugcugguuauggcugacugcgccuuccgacguaacuuauccaccagucauacuuacacuacacccccuuaugacgacgcggagaccuacgugugauaauaggcuggagccucgguggccaugcuucuugccccuugggccuccccccagccccuccuccccuuccugcacccguacccccguggucuuugaauaaagucugagugggcggc

SEQ ID NO: 154 - RNA, 2761 nt, Artificial Sequence
  Synthetic Polynucleotide
gggaaauaagagagaaaagaagaguaagaagaaauauaagagccaccauggaagccgccuuacuggucugccaguacacuauucagucccucauccaucucacaggcgaggacccgggguucuucaacgucgaaauccccgaauucccauucuaucccaccuguaacgucugcacagccgacguuaacguuacaaucaauuucgacgugggcgggaaaaaacaccagcuggaccucgacuuugggcagcugacgccccacacuaaagccguuuaccagcccaggggugcauucgguggaucugaaaaugcuacaaaccucuuucugcuugagcugcuuggugcuggagagcuggcccugacaaugcgcagcaaaaaguugccaaucaaugugaccacaggugaagaacagcaggugucccuagaauccguggauguguacuuccaggacguuuucggcacaauguggugccaucacgcagagaugcaaaauccgguguaccuuauccccgaaacagugccguacauuaaaugggauaauuguaacuccacaaacaucacggcaguggugcgcgcucaggggcuggacgugacacucccccuuuccuuaccaacaagugcucaagauuccaacuuuucugugaaaaccgagaugcugggcaacgagauugauauugaaugcaucauggaggauggcgagauuagccagguguugcccggcgacaauaaauuuaauauuaccuguuccggcuaugagucacacgugccaaguggaggcauucucacgagcaccucucccguugcaacacccauuccugggacaggguacgcauauagucucaggcugacaccgagaccgguaucgcgcuucuuagguaacaauuccaucuuguauguguuuuacagcggaaacgggccaaaggccucaggaggagacuacugcauccagagcaauauaguuuuuagcgacgagaucccugccucacaagacaugcccaccaacaccaccgacaucacguacgucggugauaaugccacuuacagcgugccuauggugaccucugaagacgcaaauucacccaaugucacgguuaccgcauucugggcuuggccaaauaacacugaaaccgacuucaaguguaaauggacccuaaccagcggcaccccaucagggugcgagaauaucagcggggccuucgccagcaaccggacauucgacaucaccgugucaggacuagggacugcuccaaaaacauuaauuauuacacggacagcaacuaacgcuacgacuacgacucacaaagugauauuuagcaaagcccccgaaucgacuacuacgagcccgacccuaaacaccaccgguuucgccgaucccaacacaacuacuggucucccaucuucgacccauguuccaacgaaucugacagcuccagcaaguacggggcccacugugaguacagccgacguuacuagcccaacucccgcggguacgacuaguggcgcgucuccagugaccccuucgccuucuccgugggauaauggaaccgagucaaaggcuccugauaugaccagcuccaccagucccguuacaacgccaacccccaaugcaacgaguccaacuccggcgguuaccacuccgacaccaaacgccaccucccccacgccugcaguuacuacgcccaccccuaaugcuacgucacccacucugggaaagaccucaccaaccucugccgugacuacuccuacaccuaaugccacaggacccacaguuggggaaaccagcccacaggcuaacgcaacuaaucauacgcuuggggggaccucucccacgcccguggucacuucacagccuaagaaugccacaagcgcugugacuacaggccagcauaauauaaccagcaguucaaccaguagcaugucccugcguccuucauccaauccugagacucugagccccagcacuagugacaacucaacuucucacaugccguugcugaccuccgcgcaucccacgggcggugagaauaucacacaggugacacccgcgucuauuagcacacaucacgugaguacguccucccccgcaccccgcccaggcacaaccucacaagcaucagguccggggaacagcagcacaaguaccaagccuggcgaagugaauguaaccaagggcacgcccccgcagaacgccacauccccucaagccccauccggccagaagaccgcuguacccaccgugacaucaacuggggggaaagcgaacucaacuaccggggggaagcauacaacagggcacggugccagaacuucuacagagccaaccacggacuacggaggggacagcacaacgcccagaccgcgguacaaugcgaccacauaccugccucccucaacuucgaguaagcugcgacccagauggaccuuuacuucucccccugucaccaccgcucaagccaccgucccgguuccaccuacuucccagccuagauucuccaaucugagcaugcuuguccuacagugggcaucacucgcgguacuaaccuugcugcuacuguuggugauggcggacugcgcguuucgccgcaacuuauccaccucccacacguacacaacaccucccuaugaugacgcugagacuuacgucugauaauaggcuggagccucgguggccaugcuucuugccccuugggccuccccccagccccuccuccccuuccugcacccguacccccguggucuuugaauaaagucugagugggcggc

SEQ ID NO: 155 - RNA, 835 nt, Artificial Sequence
  Synthetic Polynucleotide
gggaaauaagagagaaaagaagaguaagaagaaauauaagagccaccauggugagcuucaagcaggugagagugccccuguucaccgccaucgcccuggugaucgugcugcugcuggccuacuuccugccccccagagugagaggcggcggcagaguggccgccgccgccaucaccugggugcccaagcccaacguggagguguggcccguggaccccccaccccccgugaacuucaacaagaccgccgagcaggaguacggcgacaaggaggugaagcugccccacuggacccccacccugcacaccuuccaggugccccagaacuacaccaaggccaacugcaccuacugcaacaccagagaguacaccuucagcuacaagggcugcugcuucuacuucaccaagaagaagcacaccuggaacggcugcuuccaggccugcgccgagcuguaccccugcaccuacuucuacggccccacccccgacauccugcccguggugaccagaaaccugaacgccaucgagagccugugggugggcguguacagagugggcgagggcaacuggaccagccuggacggcggcaccuucaagguguaccagaucuucggcagccacugcaccuacgugagcaaguucagcaccgugcccgugagccaccacgagugcagcuuccugaagcccugccugugcgugagccagagaagcaacagcugauaauaggcuggagccucgguggccaugcuucuugccccuugggccuccccccagccccuccuccccuuccugcacccguacccccguggucuuugaauaaagucugagugggcggc

SEQ ID NO: 156 - RNA, 577 nt, Artificial Sequence
  Synthetic Polynucleotide
gggaaauaagagagaaaagaagaguaagaagaaauauaagagccaccaugagagccgugggcguguuccuggccaucugccuggugaccaucuucgugcugcccaccuggggcaacugggccuaccccugcugccacgugacccagcugagagcccagcaccugcuggcccuggagaacaucagcgacaucuaccuggugagcaaccagaccugcgacggcuucagccuggccagccugaacagccccaagaacggcagcaaccagcuggugaucagcagaugcgccaacggccugaacguggugagcuucuucaucagcauccugaagagaagcagcagcgcccugaccggccaccugagagagcugcugaccacccuggagacccuguacggcagcuucagcguggaggaccuguucggcgccaaccugaacagauacgccuggcacagaggcggcugauaauaggcuggagccucgguggccaugcuucuugccccuugggccuccccccagccccuccuccccuuccugcacccguacccccguggucuuugaauaaagucugagugggcggc

SEQ ID NO: 157 - RNA, 2284 nt, Artificial Sequence
  Synthetic Polynucleotide
gggaaauaagagagaaaagaagaguaagaagaaauauaagagccaccaugcaguuguugugcguguucugccucguguuacucugggaggugggcgccgccagccuuagcgaggugaagcuccacuuggacaucgagggccacgccagccacuacaccauccccuggaccgagcucauggccaaggugcccggccuuagccccgaggcccuguggcgggaggccaacgugaccgaggaccuggccagcaugcugaaccgguacaagcugaucuacaagaccagcggcacccugggcaucgcccuggccgagcccguggacauccccgccguuagcgaaggcagcaugcagguggacgccagcaaggugcaccccggcgugaucagcggccugaacagccccgccuguauguugagcgccccacuggagaagcagcuguucuacuacaucggcaccaugcugcccaacacccggccccacagcuacguguucuaccagcugcggugccaccugagcuacguugcccugagcaucaacggcgacaaguuccaguacaccggcgccaugaccagcaaguuccugaugggcaccuacaagcgggucaccgagaagggcgacgagcacgugcugucacugguguucggcaagaccaaggaccugcccgaccugcggggccccuucagcuacccuaguuugaccagcgcccagagcggcgacuacagcuuggugaucgugaccaccuucgugcacuacgccaacuuccacaacuacuucgugcccaaccugaaggacauguucagccgggccgugaccaugacugccgcuucuuacgcccgguacgugcugcagaagcugguccugcuggagaugaagggcggcugccgggagcccgagcuggacaccgaaacacugaccaccauguucgaggugagcguggccuucuucaaggugggucacgcggugggcgaaaccggcaacggcugcguggacuuacgcuggcuggccaagagcuucuucgagcugaccgugcugaaggauaucaucggcaucugcuacggcgccaccgugaagggcaugcagagcuacggccuggagcggcuggccgccaugcuuauggcaacagugaagauggaggagcugggacaccugacaacagagaagcaggaguacgcccugagacuggccacagugggcuacccaaaggccggcguguacaguggacugaucggcggcgcaaccagcgugcugcuauccgcuuacaaccggcacccgcuguuccagccccugcacaccgugaugcgggaaacccuguucaucggaagccacgucgugcugcgggagcugaggcugaacguaaccacccagggcccuaaucuggcccuguaucagcuccucaguaccgcccugugcagcgcccuugagaucggcgaggugcucagaggccuggcccucgguaccgagagcggccucuucagcccaugcuacuuaagccugcgguucgaccugacccgggacaaguugcugagcauggccccgcaggaggccacacuggaccaggcagcuguauccaacgccguggacggcuuccugggcagacugucccuggaacgggaggaccgggacgccuggcaccugccugccuacaaguguguggaucggcuggacaaggugcugaugaucaucccucugauuaaugucaccuucaucaucagcagcgaccgggaggugcggggauccgcccucuacgaggccagcaccaccuaucugagcagcagccuguuccugucuccugugaucaugaacaagugcagccagggcgccguggccggcgagccccggcagauccccaagauccagaacuucacccggacccagaagucuugcaucuucugcggcuucgcccuuuuguccuacgacgagaaggagggcuuggagacuacaaccuacaucaccagccaggaggugcagaacagcauccugucaucuaauuacuucgacuucgacaaccugcacguucauuaccugcuccucaccaccaacgguaccgucauggaaaucgccggacuguacgaggagcgggcccauguugugcuggccaucauccuguacuucaucgcuuucgcacuuggcaucuuccuggugcacaagaucgugauguucuuccugugauaauaggcuggagccucgguggccaugcuucuugccccuugggccuccccccagccccuccuccccuuccugcacccguacccccguggucuuugaauaaagucugagugggcggc

SEQ ID NO: 158 - RNA, 1324 nt, Artificial Sequence
  Synthetic Polynucleotide
gggaaauaagagagaaaagaagaguaagaagaaauauaagagccaccauggaacacgaccuugagaggggcccaccgggcccgcgacggccaccucgaggaccuccccucuccucuucccuaggccuugcucuccuucuccuccucuuggcgcuacuguuuuggcuguacaucguuaugagugacuggacuggaggagcccuccuuguccucuauuccuuugcucucaugcuuauaauuauaauuuugaucaucuuuaucuucagaagagaccuucucuguccacuuggagcccuuuguauacuccuacugaugaucacccuccugcucaucgcucucuggaauuugcacggacaggcauuguuccuuggaauugugcuguucaucuucgggugcuuacuugucuuagguaucuggaucuacuuauuggagaugcucuggcgacuuggugccaccaucuggcagcuuuuggccuucuuccuagccuucuuccuagaccucauccugcucauuauugcucucuaucuacaacagaacugguggacucuauugguugaucuccuuuggcuccuccuguuucuggcgauuuuaaucuggauguauuaccauggacaacgacacagugaugaacaccaccacgaugacucccucccgcacccucaacaagcuaccgaugauucuggccaugaaucugacucuaacuccaacgagggcagacaccaccugcucgugaguggagccggcgacggaccaccacucugcucucagaaccuaggcgcaccuggaggugguccugacaauggcccacaggacccugacaacacggaugauaauggcccacaggacccugauaacacugaugacaauggcccacaugacccgcugccucaagacccagacaauacugaugacaauggcccacaggacccugacaacacugaugacaauggcccgcacgacccguuaccucauagcccuagcgacucugcuggaaaugauggaggcccuccacaauugacggaagagguugagaacaaaggaggugaccagggcccgccuuugaugacagacggaggcggcggucauagucaugauuccggccauggcggcggugauccacaccuuccuacgcugcuguuggguucuucugguuccgguggagaugaugacgacccgcacggcccaguucagcuaagcuacuaugacugauaauaggcuggagccucgguggccaugcuucuugccccuugggccuccccccagccccuccuccccuuccugcacccguacccccguggucuuugaauaaagucugagugggcggc

SEQ ID NO: 159 - RNA, 1657 nt, Artificial Sequence
  Synthetic Polynucleotide
gggaaauaagagagaaaagaagaguaagaagaaauauaagagccaccauggggucccuagaaauggugccaaugggcgcggguccuccuagccccggcggggauccggauggguacgauggcggaaacaacucccaauauccaucugcuucuggcucuucugggaacacgcccaccccaccgaacgaugaggaacgugaaucuaaugaagagccaccaccgccuuaugaggacccauauuggggcaauggcgaccgucacucggacuaucaaccacuaggaacccaagaucaaagucuguacuugggauugcaacacgacgggaaugacgggcucccuccaccucccuacucuccacgggaugacucaucucaacacauauacgaagaagcgggcagaggaaguaugaauccaguaugccugccuguaauuguugcgcccuaccucuuuuggcuggcggcuauugccgccucguguuucacggccucaguuaguaccguugugaccgccaccggcuuggcccucucacuucuacucuuggcagcaguggccagcucauaugccgcugcacaaaggaaacugcugacaccggugacagugcuuacugcgguugucacuuucuuugcaauuugccuaacauggaggauugaggacccaccuuuuaauucucuucuguuugcauugcuggccgcagcuggcggacuacaaggcauuuacguucuggugaugcuugugcuccugauacuagcguacagaaggagauggcgccguuugacuguuuguggcggcaucauguucuuggcauguguacuuguccucaucgucgacgcuguuuugcagcugaguccccuccuuggagcuguaacugugguuuccaugacgcugcugcuacuggcuuucguccucuggcucucuucgccagguggccuagguacucuuggugcagcccuuuuaacauuggcagcagcucuggcacugcuagcgucacugauuuugggcacacuuaacuugacuacaauguuccuucucaugcuccuauggacacuugugguucuccugauuugcucuucgugcucuucauguccacugagcaagauccuucuggcacgacuguuccuauaugcucucgcacucuuguugcuagccuccgcgcuaaucgcugguggcaguauuuugcaaacaaacuucaagaguuuaagcagcacugaauuuauacccaauuuguucugcauguuauuacugauugucgcuggcauacucuucauucuugcuauccugaccgaauggggcaguggaaauagaacauacgguccagucuuuaugugccucgguggccugcucaccaugguagccggcgcuguguggcugacggugaugucuaacacgcuuuugucugccuggauucuuacagcaggauuccugauuuuccucauuggcuuugcccucuuuggggucauuagaugcugccgcuacugcugcuacuacugccuuacacuggaaagugaggagcgcccaccgaccccauaucgcaacacuguaugauaauaggcuggagccucgguggccaugcuucuugccccuugggccuccccccagccccuccuccccuuccugcacccguacccccguggucuuugaauaaagucugagugggcggc

SEQ ID NO: 160 - RNA, 892 nt, Artificial Sequence
  Synthetic Polynucleotide
gggaaauaagagagaaaagaagaguaagaagaaauauaagagccaccaugggcagaagacccuucuuucaccccgugggagaagccgacuauuucgaguaccaccaggagggcgguccugacggcgagcccgacgugccuccaggcgccaucgaacagggccccgcugacgauccuggcgaggggccuuccacaggcccucgcggccagggagauggcggaaggcggaagaagggcggcugguuuggcaagcauaggggccagggcggcuccaaucccaaguucgagaauaucgccgaggggcuccgggcucugcuggcccggucgcacgucgaacguaccacugacgaggggacguggguggccggcgucuuuguguacggaggauccaagaccucccuguacaaccugagaaggggcaccgcccuugccaucccucagugcagacucacgccccugagcaggcuccccuuugggauggcuccugggccaggcccgcagcccgggccccucagggaaagcaucguguguuacuuuaugguguuucugcagacacacaucuuugcagaaguucugaaagaugcaaucaaggaucuggugaugaccaagccugcaccuacgugcaauaucagggugacaguaugcuccuucgacgacgguguggaccucccgcccugguucccacccauggucgagggugccgccgccgagggagacgauggcgacgacggugaugaggguggagacggagaugaaggcgaggaggggcaggagugauaauaggcuggagccucgguggccaugcuucuugccccuugggccuccccccagccccuccuccccuuccugcacccguacccccguggucuuugaauaaagucugagugggcggc

SEQ ID NO: 161 - RNA, 2998 nt, Artificial Sequence
  Synthetic Polynucleotide
gggaaauaagagagaaaagaagaguaagaagaaauauaagagccaccauggacaaggacaggcccggcccucccgccuuggacgacaacauggaggaggaggugcccagcaccagcguggugcaggagcaggugagcgccggcgacugggagaacguguuaaucgaguugagcgacagcagcagcgagaaggaggccgaggacgcccaccuggagcccgcccagaagggcaccaagaggaagaggguggaccacgacgcuggcggaucugccccugccaggcccaugcugccaccccagcccgaccugcccggcagggaggccauccugaggagguucccacuggaccugaggacccugcugcaggccaucggcgccgccgccaccaggaucgacaccagggccaucgaccaguucuucggcagccagaucagcaacaccgagauguacaucauguacgccauggccaucagacaagcaauuagggaucgacgcagaaauccugccagcaggagggaccaggccaaguggaggcugcagacccuggccgccggcuggcccaugggcuaccaggccuacagcagcuggauguacagcuacaccgaccaccagaccacuccgaccuucgugcaccuccaggcuacccugggcugcacuggcggucgcaggugccacgugaccuucucagcgggcaccuucaagcugcccaggugcacaccuggcgacaggcaguggcuguacgugcagagcagcgugggcaacauuguucagaguugcaaccccagguacagcaucuucuucgacuacauggcgauucacaggagccugaccaagaucugggaggaaguccugaccccugaccagagggugagcuucauggaguuccugggcuuccugcagaggaccgaccugagcuacaucaagagcuucgugagcgacgcccugggcaccaccagcauccagacuccuuggaucgacgauaacccuagcaccgaaaccgcccaggccuggaacgccgguuuccugaggggcagggccuacggcaucgaccugcuccggaccgagggcgagcacguggagggcgccaccggcgagacuagggaggagagcgaggacacugagagcgacggcgacgacgaggaucugccgugcaucgugagcaggggcggccccaaggugaagaggccucccaucuucauccggaggcuucacaggcugcugcugaugagggccggcaagcguacugaacagggcaaggagguacuggagaaggccaggggcagcacauauggcaccccuagaccgccugugcccaagccgcguccugaagucccgcagagugaugagacagcgacuagccauggcagugcucaggugcccgagccacccaccauccaucucgccgcacagggcauggccuacccacugcacgagcagcacggcauggcgcccugccccguggcccaggcuccuccaaccccgcuuccuccaguauccccuggugaccaguugccaggcguguucagcgacgguaggguggccugcgcgccaguuccugcaccagcaggcccaauugugaggcccugggagcccucccuaacccaggcggcaggucaggccuucgcuccaguuagaccacagcacaugcccguggaaccggugccagugccuacgguggcgcuggagaggcccguguacccaaagccugugcgaccugcgccuccuaagaucgccaugcaaggcccgggcgagacuagcgguaucaggcgggccagggagagguggcgcccggcaccguggacucccaacccaccaaggucaccuagucagaugagcgugcgugauaggcuggcacggcuucgggcagaggcucagguaaagcaggccaguguggaggugcagccaccacagcugacucagguguccccgcagcagcccauggagggcccacuggugccggaacagcagauguuccccggcgccccguucagccagguggccgacgugguuagggcuccuggcgugccugcuaugcagccucaguacuucgaccuaccgcugauccagcccaucagucaaggugccccaguggccccacugagggcuagcaugggcccggucccuccuguuccagccacccagccucaauauuucgacauuccucugaccgagccuauaaaccagggcgcgucugcggcccacuuccugccucaacagccaauggaaggcccgcuggucccagaacaguggauguucccuggagcugcccugagccaaucagugaggccgggaguugcccagagccaguauuucgaucucccuuugacacagccuaucaaucacggagcaccugccgcucacuuccuucaccagccuccgauggaagguccuuggguuccagagcaauggauguuccaaggugcgccaccaucucagggcacagacgugguccagcaucagcuggacgcgcuuggcuacacucuacacggccugaaccacccgggcguuccagugaguccagccgugaaccaguaccaucucucucaggcugccuucggccugcccauugacgaggacgagagcggcgagggcagcgauaccagcgagcccugcgaagcccuggaucuuuccauccacggccgaccuugcccacaggcuccagaguggcccguacaggaagaaggcggccaggacgccaccgagguccuggacuuguccauacauggcagaccgcgcccuaggaccccggaguggccaguucagggugaagguggucagaacgugaccggcccggaaacccgaaggguggucguguccgcuguuguccacaugugucaggaugacgaauucccagaucugcaagauccacccgacgaggccugauaauaggcuggagccucgguggccaugcuucuugccccuugggccuccccccagccccuccuccccuuccugcacccguacccccguggucuuugaauaaagucugagugggcggc

SEQ ID NO: 162 - RNA, 2761 nt, Artificial Sequence
  Synthetic Polynucleotide
gggaaauaagagagaaaagaagaguaagaagaaauauaagagccaccauggaggcagcacugcuggucugccaguauacaauccagucgcucauucaucugacaggcgaggaccccggcuucuuuaacguggaaaucccagaguucccuuucuauccaaccuguaacguuugcacuuacgacgugaacgugacaaucaauuucgacgugggaggaaagaagcaucagcuugaucuggauuucggccaacugacgccacacaccaaagcgguguaccaaccaaggggugcauuuggagggagcgagaaugcuacaaaucuguucuuacuggaacugcuuggugcaggagagcuggcacuaaccaugcgaagcaagaagcuccccaucaacguuaccaccggggaagaacagcaagucagccuugaauccguggauguguacuuucaggauguuuucggcaccauguggugucaccacgcugagaugcagaaucccguguaucucauacccgagacuguacccuacaucaagugggauaauugcaauucaacuaauauuacggcuguggugagggcccagggcuuggacgugacucugcccuuaucucuaccuacuucugcccaagacuccaauuucucugucaagaccgagaugcucgggaaugagaucgauaucgagugcaucauggaggacggugagauaagccagguucugcccggcgacaacaaguucaauaucacuuguucuggcuacgagucccaugugccuagugguggcauacucacaaguacuucucccguagccacgcccauucccggaaccggauacgccuacagucugcgucugaccccacggccuguguccagauuccuggguaacaauaguaucuuauacguguuuuauagcggaaacggcccuaaagcguccggaggggacuauuguauucagaguaauaucguuuucucugaugagauuccugccagucaggacaugccgacaaacacaacugauauuaccuacgugggcgacaaugccacguauucagugcccauggucacgagcgaggacgccaauucaccaaauguuacuguaacagcuuucugggccuggccaaauaacacugagacugacuucaaauguaaguggacuuugaccucuggaacuccgucggguugcgagaauaucagcggggccuuugcuuccaacaggacuuucgacaucacugucucagggcuggggacagcaccgaagacauuaaucauaacacggaccgccaccaacgccacgacuacaacccauaaggugaucuuuuccaaggcaccugaguccaccacuaccuccccgacucuuaacacuacgggcuucgcugaucccaacaccacuacgggguugccuagcucgacacaugugccgacgaaccugacugccccugcaucgaccgggcccacaguuucgaccgccgaugugacaucaccaacgcccgcagguacaaccucaggcgccagcccagugaccccuuccccaagccccugggauaauggaacggaguccaaggcuccugauaugacuuccucuaccagccccgugacuacacccacucccaacgcaacuagcccaaccccagcugugacgacgcccaccccgaacgcgacaucucccacaccugcugugacaaccccaaccccuaacgccacuagcccuacccuagguaagaccaguccgacuagcgccguuacaaccccuaccccuaacgcaaccggcccgaccgugggcgagacuuccccgcaagccaaugcgacaaaucacacauugggcgggaccucuccuacaccagucguuacaucucagccuaagaacgcuaccuccgcugucacuaccggacagcacaacaucaccagcucaagcacgaguuccaugagcuugcggccgagcucaaaucccgagacccuaucaccauccacaucagacaacaguacuucacacaugccacucuugacgagcgcucaccccaccggcggcgagaacaucacccaggugacuccggcgucuauuuccacccaccacgucagcacgucgucucccgcaccgagaccagggacgacuucucaggccagugggccuggcaacuccucuacaagcacaaagccaggcgaaguuaacgugacaaagggaacgccuccccagaacgcaaccaguccucaggcgcccagcgggcagaagacugcggugccaacugugaccagcaccgguggcaaggccaacucaacaacuggaggcaagcauacgacggggcacggcgcccggaccuccacugaacccacgaccgauuacggaggugacagcacaacaccgcggccacgauauaaugccaccacuuaucugccaccauccacaagcuccaagcugcggccacgguggaccuucacaagcccacccgugacgacugcccaagcgacggugccagugccaccuacaagccagccacgcuucuccaaccuuaguaugcucguucuccagugggccagccuugcuguucugacccuccuccugcugcucgugauggccgauugcgccuuuaggagaaaccucagcacuagccacacguacaccacgccgcccuacgaugacgccgagacuuacgucugauaauaggcuggagccucgguggccaugcuucuugccccuugggccuccccccagccccuccuccccuuccugcacccguacccccguggucuuugaauaaagucugagugggcggc

SEQ ID NO: 163 - RNA, 2761 nt, Artificial Sequence
  Synthetic Polynucleotide
gggaaauaagagagaaaagaagaguaagaagaaauauaagagccaccauggaggcagcacugcuggucugccaguauacaauccagucgcucauucaucugacaggcgaggaccccggcuucuuuaacguggaaaucccagaguucccuuucuauccaaccuguaacguuugcacugcugacgugaacgugacauucaauuucgacgugggaggaaagaagcaucagcuugaucuggauuucggccaacugacgccacacaccaaagcgguguaccaaccaaggggugcauuuggagggagcgagaaugcuacaaaucuguucuuacuggaacugcuuggugcaggagagcuggcacuaaccaugcgaagcaagaagcuccccaucaacguuaccaccggggaagaacagcaagucagccuugaauccguggauguguacuuucaggauguuuucggcaccauguggugucaccacgcugagaugcagaaucccguguaucucauacccgagacuguacccuacaucaagugggauaauugcaauucaacuaauauuacggcuguggugagggcccagggcuuggacgugacucugcccuuaucucuaccuacuucugcccaagacuccaauuucucugucaagaccgagaugcucgggaaugagaucgauaucgagugcaucauggaggacggugagauaagccagguucugcccggcgacaacaaguucaauaucacuuguucuggcuacgagucccaugugccuagugguggcauacucacaaguacuucucccguagccacgcccauucccggaaccggauacgccuacagucugcgucugaccccacggccuguguccagauuccuggguaacaauaguaucuuauacguguuuuauagcggaaacggcccuaaagcguccggaggggacuauuguauucagaguaauaucguuuucucugaugagauuccugccagucaggacaugccgacaaacacaacugauauuaccuacgugggcgacaaugccacguauucagugcccauggucacgagcgaggacgccaauucaccaaauguuacuguaacagcuuucugggccuggccaaauaacacugagacugacuucaaauguaaguggacuuugaccucuggaacuccgucggguugcgagaauaucagcggggccuuugcuuccaacaggacuuucgacaucacugucucagggcuggggacagcaccgaagacauuaaucauaacacggaccgccaccaacgccacgacuacaacccauaaggugaucuuuuccaaggcaccugaguccaccacuaccuccccgacucuuaacacuacgggcuucgcugaucccaacaccacuacgggguugccuagcucgacacaugugccgacgaaccugacugccccugcaucgaccgggcccacaguuucgaccgccgaugugacaucaccaacgcccgcagguacaaccucaggcgccagcccagugaccccuuccccaagccccugggauaauggaacggaguccaaggcuccugauaugacuuccucuaccagccccgugacuacacccacucccaacgcaacuagcccaaccccagcugugacgacgcccaccccgaacgcgacaucucccacaccugcugugacaaccccaaccccuaacgccacuagcccuacccuagguaagaccaguccgacuagcgccguuacaaccccuaccccuaacgcaaccggcccgaccgugggcgagacuuccccgcaagccaaugcgacaaaucacacauugggcgggaccucuccuacaccagucguuacaucucagccuaagaacgcuaccuccgcugucacuaccggacagcacaacaucaccagcucaagcacgaguuccaugagcuugcggccgagcucaaaucccgagacccuaucaccauccacaucagacaacaguacuucacacaugccacucuugacgagcgcucaccccaccggcggcgagaacaucacccaggugacuccggcgucuauuuccacccaccacgucagcacgucgucucccgcaccgagaccagggacgacuucucaggccagugggccuggcaacuccucuacaagcacaaagccaggcgaaguuaacgugacaaagggaacgccuccccagaacgcaaccaguccucaggcgcccagcgggcagaagacugcggugccaacugugaccagcaccgguggcaaggccaacucaacaacuggaggcaagcauacgacggggcacggcgcccggaccuccacugaacccacgaccgauuacggaggugacagcacaacaccgcggccacgauauaaugccaccacuuaucugccaccauccacaagcuccaagcugcggccacgguggaccuucacaagcccacccgugacgacugcccaagcgacggugccagugccaccuacaagccagccacgcuucuccaaccuuaguaugcucguucuccagugggccagccuugcuguucugacccuccuccugcugcucgugauggccgauugcgccuuuaggagaaaccucagcacuagccacacguacaccacgccgcccuacgaugacgccgagacuuacgucugauaauaggcuggagccucgguggccaugcuucuugccccuugggccuccccccagccccuccuccccuuccugcacccguacccccguggucuuugaauaaagucugagugggcggc

SEQ ID NO: 164 - RNA, 2761 nt, Artificial Sequence
  Synthetic Polynucleotide
gggaaauaagagagaaaagaagaguaagaagaaauauaagagccaccauggaggcagcacugcuggucugccaguauacaauccagucgcucauucaucugacaggcgaggaccccggcuucuuuaacguggaaaucccagaguucccuuucuauccaaccuguaacguuugcacugcugacgugaacgugacaaucaauuucgacgugggaggaaagaagcaucagcuugaucuggauuucggccaacugacgccacacaccaaagcgguguaccaaccaaggggugcauuuggagggagcgagaaugcuacaaaucuguucuuacuggaacugcuuggugcaggagagcuggcacuaaccaugcgaagcaagaagcuccccaucaacguuaccaccggggaagaacagcaagucagccuugaauccguggauguguacuuucaggauguuuucggcaccauguggugucaccacgcugagaugcagaaucccguguaucucauacccgagacuguacccuacaucaagugggauaauugcaauucaacuaauauuacggcuguggugagggcccagggcuuggacgugacucugcccuuaucucuaccuacuucugcccaagacuccaauuucucugucaagaccgagauacucgggaaugagaucgauaucgagugcaucauggaggacggugagauaagccagguucugcccggcgacaacaaguucaauaucacuuguucuggcuacgagucccaugugccuagugguggcauacucacaaguacuucucccguagccacgcccauucccggaaccggauacgccuacagucugcgucugaccccacggccuguguccagauuccuggguaacaauaguaucuuauacguguuuuauagcggaaacggcccuaaagcguccggaggggacuauuguauucagaguaauaucguuuucucugaugagauuccugccagucaggacaugccgacaaacacaacugauauuaccuacgugggcgacaaugccacguauucagugcccauggucacgagcgaggacgccaauucaccaaauguuacuguaacagcuuucugggccuggccaaauaacacugagacugacuucaaauguaaguggacuuugaccucuggaacuccgucggguugcgagaauaucagcggggccuuugcuuccaacaggacuuucgacaucacugucucagggcuggggacagcaccgaagacauuaaucauaacacggaccgccaccaacgccacgacuacaacccauaaggugaucuuuuccaaggcaccugaguccaccacuaccuccccgacucuuaacacuacgggcuucgcugaucccaacaccacuacgggguugccuagcucgacacaugugccgacgaaccugacugccccugcaucgaccgggcccacaguuucgaccgccgaugugacaucaccaacgcccgcagguacaaccucaggcgccagcccagugaccccuuccccaagccccugggauaauggaacggaguccaaggcuccugauaugacuuccucuaccagccccgugacuacacccacucccaacgcaacuagcccaaccccagcugugacgacgcccaccccgaacgcgacaucucccacaccugcugugacaaccccaaccccuaacgccacuagcccuacccuagguaagaccaguccgacuagcgccguuacaaccccuaccccuaacgcaaccggcccgaccgugggcgagacuuccccgcaagccaaugcgacaaaucacacauugggcgggaccucuccuacaccagucguuacaucucagccuaagaacgcuaccuccgcugucacuaccggacagcacaacaucaccagcucaagcacgaguuccaugagcuugcggccgagcucaaaucccgagacccuaucaccauccacaucagacaacaguacuucacacaugccacucuugacgagcgcucaccccaccggcggcgagaacaucacccaggugacuccggcgucuauuuccacccaccacgucagcacgucgucucccgcaccgagaccagggacgacuucucaggccagugggccuggcaacuccucuacaagcacaaagccaggcgaaguuaacgugacaaagggaacgccuccccagaacgcaaccaguccucaggcgcccagcgggcagaagacugcggugccaacugugaccagcaccgguggcaaggccaacucaacaacuggaggcaagcauacgacggggcacggcgcccggaccuccacugaacccacgaccgauuacggaggugacagcacaacaccgcggccacgauauaaugccaccacuuaucugccaccauccacaagcuccaagcugcggccacgguggaccuucacaagcccacccgugacgacugcccaagcgacggugccagugccaccuacaagccagccacgcuucuccaaccuuaguaugcucguucuccagugggccagccuugcuguucugacccuccuccugcugcucgugauggccgauugcgccuuuaggagaaaccucagcacuagccacacguacaccacgccgcccuacgaugacgccgagacuuacgucugauaauaggcuggagccucgguggccaugcuucuugccccuugggccuccccccagccccuccuccccuuccugcacccguacccccguggucuuugaauaaagucugagugggcggc

SEQ ID NO: 165 - RNA, 2761 nt, Artificial Sequence
  Synthetic Polynucleotide
gggaaauaagagagaaaagaagaguaagaagaaauauaagagccaccauggaggcagcacugcuggucugccaguauacaauccagucgcucauucaucugacaggcgaggaccccggcuucuuuaacguggaaaucccagaguucccuuucuauccaaccuguaacguuugcacugcugacgugaacgugacaaucaauuucgacgugggaggaaagaagcaucagcuugaucuggauuucggccaacugacgccacacaccaaagcgguguaccaaccaaggggugcauuuggagggagcgagaaugcuacaaaucuguucuuacuggaacugcuuggugcaggagagcuggcacuaaccaugcgaagcaagaagcuccccaucaacguuaccaccggggaagaacagcaagucagccuugaauccguggauguguacuuucaggauguuuucggcaccauguggugucaccacgcugagaugcagaaucccguguaucucauacccgagacuguacccuacaucaagugggauaauugcaauucaacuaauauuacggcuguggugagggcccagggcuuggacgugacucugcccuuaucucuaccuacuucugcccaagacuccaauuucucugucaagaccgagaugcucgggaaugagaucgauaucgagugcaucauggaggacggugagauaagccagguucugcccggcgacaacaaguucaauaucacuuguucuggcuacgagucccaugugccuagugguggcauacucacaaguacuucucccguagccacgcccauucccggaaccggauacgccuacagucugcgucugaccccacggccuguguccagauuccuggguaacaauaguaucuuauacguguuuuauagcggaaacggcccuaaagcguccggaggggacuauuguauucagaguaauaucguuuucucugaugagauuccugccagucaggacaugccgacaaacacaacugauauuaccuacgugggcgacaaugccacguauucagugcccauggucacgagcgaggacgccaauucaccaaauguuacuguaacagcuuucugggccuggccaaauaacacugagacugacuucaaauguaaguggacuuugaccucuggaacuccgucggguugcgagaauaucagcggggccuuugcuuccaacaggacuuucgacaucacugucucagggcuggggacagcaccgaagacauuaaucauaacacggaccgccaccaacgccacgacuacaaccuggaaggugaucuuuuccaaggcaccugaguccaccacuaccuccccgacucuuaacacuacgggcuucgcugaucccaacaccacuacgggguugccuagcucgacacaugugccgacgaaccugacugccccugcaucgaccgggcccacaguuucgaccgccgaugugacaucaccaacgcccgcagguacaaccucaggcgccagcccagugaccccuuccccaagccccugggauaauggaacggaguccaaggcuccugauaugacuuccucuaccagccccgugacuacacccacucccaacgcaacuagcccaaccccagcugugacgacgcccaccccgaacgcgacaucucccacaccugcugugacaaccccaaccccuaacgccacuagcccuacccuagguaagaccaguccgacuagcgccguuacaaccccuaccccuaacgcaaccggcccgaccgugggcgagacuuccccgcaagccaaugcgacaaaucacacauugggcgggaccucuccuacaccagucguuacaucucagccuaagaacgcuaccuccgcugucacuaccggacagcacaacaucaccagcucaagcacgaguuccaugagcuugcggccgagcucaaaucccgagacccuaucaccauccacaucagacaacaguacuucacacaugccacucuugacgagcgcucaccccaccggcggcgagaacaucacccaggugacuccggcgucuauuuccacccaccacgucagcacgucgucucccgcaccgagaccagggacgacuucucaggccagugggccuggcaacuccucuacaagcacaaagccaggcgaaguuaacgugacaaagggaacgccuccccagaacgcaaccaguccucaggcgcccagcgggcagaagacugcggugccaacugugaccagcaccgguggcaaggccaacucaacaacuggaggcaagcauacgacggggcacggcgcccggaccuccacugaacccacgaccgauuacggaggugacagcacaacaccgcggccacgauauaaugccaccacuuaucugccaccauccacaagcuccaagcugcggccacgguggaccuucacaagcccacccgugacgacugcccaagcgacggugccagugccaccuacaagccagccacgcuucuccaaccuuaguaugcucguucuccagugggccagccuugcuguucugacccuccuccugcugcucgugauggccgauugcgccuuuaggagaaaccucagcacuagccacacguacaccacgccgcccuacgaugacgccgagacuuacgucugauaauaggcuggagccucgguggccaugcuucuugccccuugggccuccccccagccccuccuccccuuccugcacccguacccccguggucuuugaauaaagucugagugggcggc

SEQ ID NO: 166 - RNA, 2761 nt, Artificial Sequence
  Synthetic Polynucleotide
gggaaauaagagagaaaagaagaguaagaagaaauauaagagccaccauggaggcagcacugcuggucugccaguauacaauccagucgcucauucaucugacaggcgaggaccccggcuucuuuaacguggaaaucccagaguucccuuucuauccaaccuguaacguuugcacuuacgacgugaacgugacauucaauuucgacgugggaggaaagaagcaucagcuugaucuggauuucggccaacugacgccacacaccaaagcgguguaccaaccaaggggugcauuuggagggagcgagaaugcuacaaaucuguucuuacuggaacugcuuggugcaggagagcuggcacuaaccaugcgaagcaagaagcuccccaucaacguuaccaccggggaagaacagcaagucagccuugaauccguggauguguacuuucaggauguuuucggcaccauguggugucaccacgcugagaugcagaaucccguguaucucauacccgagacuguacccuacaucaagugggauaauugcaauucaacuaauauuacggcuguggugagggcccagggcuuggacgugacucugcccuuaucucuaccuacuucugcccaagacuccaauuucucugucaagaccgagauacucgggaaugagaucgauaucgagugcaucauggaggacggugagauaagccagguucugcccggcgacaacaaguucaauaucacuuguucuggcuacgagucccaugugccuagugguggcauacucacaaguacuucucccguagccacgcccauucccggaaccggauacgccuacagucugcgucugaccccacggccuguguccagauuccuggguaacaauaguaucuuauacguguuuuauagcggaaacggcccuaaagcguccggaggggacuauuguauucagaguaauaucguuuucucugaugagauuccugccagucaggacaugccgacaaacacaacugauauuaccuacgugggcgacaaugccacguauucagugcccauggucacgagcgaggacgccaauucaccaaauguuacuguaacagcuuucugggccuggccaaauaacacugagacugacuucaaauguaaguggacuuugaccucuggaacuccgucggguugcgagaauaucagcggggccuuugcuuccaacaggacuuucgacaucacugucucagggcuggggacagcaccgaagacauuaaucauaacacggaccgccaccaacgccacgacuacaaccuggaaggugaucuuuuccaaggcaccugaguccaccacuaccuccccgacucuuaacacuacgggcuucgcugaucccaacaccacuacgggguugccuagcucgacacaugugccgacgaaccugacugccccugcaucgaccgggcccacaguuucgaccgccgaugugacaucaccaacgcccgcagguacaaccucaggcgccagcccagugaccccuuccccaagccccugggauaauggaacggaguccaaggcuccugauaugacuuccucuaccagccccgugacuacacccacucccaacgcaacuagcccaaccccagcugugacgacgcccaccccgaacgcgacaucucccacaccugcugugacaaccccaaccccuaacgccacuagcccuacccuagguaagaccaguccgacuagcgccguuacaaccccuaccccuaacgcaaccggcccgaccgugggcgagacuuccccgcaagccaaugcgacaaaucacacauugggcgggaccucuccuacaccagucguuacaucucagccuaagaacgcuaccuccgcugucacuaccggacagcacaacaucaccagcucaagcacgaguuccaugagcuugcggccgagcucaaaucccgagacccuaucaccauccacaucagacaacaguacuucacacaugccacucuugacgagcgcucaccccaccggcggcgagaacaucacccaggugacuccggcgucuauuuccacccaccacgucagcacgucgucucccgcaccgagaccagggacgacuucucaggccagugggccuggcaacuccucuacaagcacaaagccaggcgaaguuaacgugacaaagggaacgccuccccagaacgcaaccaguccucaggcgcccagcgggcagaagacugcggugccaacugugaccagcaccgguggcaaggccaacucaacaacuggaggcaagcauacgacggggcacggcgcccggaccuccacugaacccacgaccgauuacggaggugacagcacaacaccgcggccacgauauaaugccaccacuuaucugccaccauccacaagcuccaagcugcggccacgguggaccuucacaagcccacccgugacgacugcccaagcgacggugccagugccaccuacaagccagccacgcuucuccaaccuuaguaugcucguucuccagugggccagccuugcuguucugacccuccuccugcugcucgugauggccgauugcgccuuuaggagaaaccucagcacuagccacacguacaccacgccgcccuacgaugacgccgagacuuacgucugauaauaggcuggagccucgguggccaugcuucuugccccuugggccuccccccagccccuccuccccuuccugcacccguacccccguggucuuugaauaaagucugagugggcggc

SEQ ID NO: 167 - RNA, 2761 nt, Artificial Sequence
  Synthetic Polynucleotide
gggaaauaagagagaaaagaagaguaagaagaaauauaagagccaccauggaggcagcacugcuggucugccaguauacaauccagucgcucauucaucugacaggcgaggaccccggcuucuuuaacguggaaaucccagaguucccuuucuauccaaccuguaacguuugcacuuacgacgugaacgugacauucaauuucgacgugggaggaaagaagcaucagcuugaucuggauuucggccaacugacgccacacaccaaagcgguguaccaaccaaggggugcauuuggagggagcgagaaugcugcgaaucuguucuuacuggaacugcuuggugcaggagagcuggcacuaaccaugcgaagcaagaagcuccccaucaacguuaccaccggggaagaacagcaagucagccuugaauccguggauguguacuuucaggauguuuucggcaccauguggugucaccacgcugagaugcagaaucccguguaucucauacccgagacuguacccuacaucaagugggauaauugcaauucagcgaauauuacggcuguggugagggcccagggcuuggacgugacucugcccuuaucucuaccuacuucugcccaagacuccaauuucgcggucaagaccgagauacucgggaaugagaucgauaucgagugcaucauggaggacggugagauaagccagguucugcccggcgacaacaaguucaauaucgcguguucuggcuacgagucccaugugccuagugguggcauacucacaaguacuucucccguagccacgcccauucccggaaccggauacgccuacagucugcgucugaccccacggccuguguccagauuccuggguaacaauaguaucuuauacguguuuuauagcggaaacggcccuaaagcguccggaggggacuauuguauucagaguaauaucguuuucucugaugagauuccugccagucaggacaugccgacaaacacaacugauauuaccuacgugggcgacaaugccacguauucagugcccauggucacgagcgaggacgccaauucaccaaauguugcgguaacagcuuucugggccuggccaaauaacacugagacugacuucaaauguaaguggacuuugaccucuggaacuccgucggguugcgagaauaucagcggggccuuugcuuccaacaggacuuucgacaucacugucucagggcuggggacagcaccgaagacauuaaucauaacacggaccgccaccaacgccgcgacuacaacccauaaggugaucuuuuccaaggcaccugaguccaccacuaccuccccgacucuuaacacuacgggcuucgcugaucccaacaccacuacgggguugccuagcucgacacaugugccgacgaaccugacugccccugcaucgaccgggcccacaguuucgaccugggaugugacaucaccaacgcccgcagguacaaccucaggcgccagcccagugaccccuuccccaagccccugggauaauggaacggaguccaaggcuccugauaugacuuccucuaccagccccgugacuacacccacucccaacgcaacuagcccaaccccagcugugacgacgcccaccccgaacgcgacaucucccacaccugcugugacaaccccaaccccuaacgccacuagcccuacccuagguaagaccaguccgacuagcgccguuacaaccccuaccccuaacgcaaccggcccgaccgugggcgagacuuccccgcaagccaaugcgacaaaucacacauugggcgggaccucuccuacaccagucguuacaucucagccuaagaacgcuaccuccgcugucacuaccggacagcacaacaucaccagcucaagcacgaguuccaugagcuugcggccgagcucaaaucccgagacccuaucaccauccacaucagacaacaguacuucacacaugccacucuugacgagcgcucaccccaccggcggcgagaacaucacccaggugacuccggcgucuauuuccacccaccacgucagcacgucgucucccgcaccgagaccagggacgacuucucaggccagugggccuggcaacuccucuacaagcacaaagccaggcgaaguuaacgugacaaagggaacgccuccccagaacgcaaccaguccucaggcgcccagcgggcagaagacugcggugccaacugugaccagcaccgguggcaaggccaacucaacaacuggaggcaagcauacgacggggcacggcgcccggaccuccacugaacccacgaccgauuacggaggugacagcacaacaccgcggccacgauauaaugccaccacuuaucugccaccauccacaagcuccaagcugcggccacgguggaccuucacaagcccacccgugacgacugcccaagcgacggugccagugccaccuacaagccagccacgcuucuccaaccuuaguaugcucguucuccagugggccagccuugcuguucugacccuccuccugcugcucgugauggccgauugcgccuuuaggagaaaccucagcacuagccacacguacaccacgccgcccuacgaugacgccgagacuuacgucugauaauaggcuggagccucgguggccaugcuucuugccccuugggccuccccccagccccuccuccccuuccugcacccguacccccguggucuuugaauaaagucugagugggcggc

SEQ ID NO: 168 - RNA, 2761 nt, Artificial Sequence
  Synthetic Polynucleotide
gggaaauaagagagaaaagaagaguaagaagaaauauaagagccaccauggaggcagcacugcuggucugccaguauacaauccagucgcucauucaucugacaggcgaggaccccggcuucuuuaacguggaaaucccagaguucccuuucuauccaaccuguaacguuugcacugcugacgugaacguggcgaucaauuucgacgugggaggaaagaagcaucagcuugaucuggauuucggccaacugacgccacacaccaaagcgguguaccaaccaaggggugcauuuggagggagcgagaaugcugcgaaucuguucuuacuggaacugcuuggugcaggagagcuggcacuaaccaugcgaagcaagaagcuccccaucaacguugcgaccggggaagaacagcaagucagccuugaauccguggauguguacuuucaggauguuuucggcaccauguggugucaccacgcugagaugcagaaucccguguaucucauacccgagacuguacccuacaucaagugggauaauugcaauucagcgaauauugcggcuguggugagggcccagggcuuggacgugacucugcccuuaucucuaccuacuucugcccaagacuccaauuucgcggucaagaccgagaugcucgggaaugagaucgauaucgagugcaucauggaggacggugagauaagccagguucugcccggcgacaacaaguucaauaucgcguguucuggcuacgagucccaugugccuagugguggcauacucacaaguacuucucccguagccacgcccauucccggaaccggauacgccuacagucugcgucugaccccacggccuguguccagauuccuggguaacaaugcgaucuuauacguguuuuauagcggaaacggcccuaaagcguccggaggggacuauuguauucagaguaauaucguuuucucugaugagauuccugccagucaggacaugccgacaaacacagcggauauuaccuacgugggcgacaaugccgcguauucagugcccauggucacgagcgaggacgccaauucaccaaauguugcgguaacagcuuucugggccuggccaaauaacgcggagacugacuucaaauguaaguggacuuugaccucuggaacuccgucggguugcgagaauaucgcgggggccuuugcuuccaacagggcguucgacaucacugucucagggcuggggacagcaccgaagacauuaaucauaacacggaccgccaccaacgccgcgacuacaacccauaaggugaucuuuuccaaggcaccugaguccaccacuaccuccccgacucuuaacacugcgggcuucgcugaucccaacaccgcgacgggguugccuagcucgacacaugugccgacgaaccuggcggccccugcaucgaccgggcccacaguuucgaccgccgaugugacaucaccaacgcccgcagguacaaccucaggcgccagcccagugaccccuuccccaagccccugggauaauggagcggaguccaaggcuccugauaugacuuccucuaccagccccgugacuacacccacucccaacgcagcgagcccaaccccagcugugacgacgcccaccccgaacgcggcgucucccacaccugcugugacaaccccaaccccuaacgccgcgagcccuacccuagguaagaccaguccgacuagcgccguuacaaccccuaccccuaacgcagcgggcccgaccgugggcgagacuuccccgcaagccaaugcggcgaaucacgcguugggcgggaccucuccuacaccagucguuacaucucagccuaagaacgcugcguccgcugucacuaccggacagcacaacaucgcgagcucaagcacgaguuccaugagcuugcggccgagcucaaaucccgagacccuaucaccauccacaucagacaacagugcgucacacaugccacucuugacgagcgcucaccccaccggcggcgagaacaucgcgcaggugacuccggcgucuauuuccacccaccacgucagcacgucgucucccgcaccgagaccagggacgacuucucaggccagugggccuggcaacuccgcgacaagcacaaagccaggcgaaguuaacguggcgaagggaacgccuccccagaacgcagcgaguccucaggcgcccagcgggcagaagacugcggugccaacugugaccagcaccgguggcaaggccaacucagcgacuggaggcaagcauacgacggggcacggcgcccggaccuccacugaacccacgaccgauuacggaggugacagcacaacaccgcggccacgauauaaugccgcgacuuaucugccaccauccacaagcuccaagcugcggccacgguggaccuucacaagcccacccgugacgacugcccaagcgacggugccagugccaccuacaagccagccacgcuucuccaaccuugcgaugcucguucuccagugggccagccuugcuguucugacccuccuccugcugcucgugauggccgauugcgccuuuaggagaaaccucgcgacuagccacacguacaccacgccgcccuacgaugacgccgagacuuacgucugauaauaggcuggagccucgguggccaugcuucuugccccuugggccuccccccagccccuccuccccuuccugcacccguacccccguggucuuugaauaaagucugagugggcggc

SEQ ID NO: 169 - RNA, 2761 nt, Artificial Sequence
  Synthetic Polynucleotide
gggaaauaagagagaaaagaagaguaagaagaaauauaagagccaccauggaggcagcacugcuggucugccaguauacaauccagucgcucauucaucugacaggcgaggaccccggcuucuuuaacguggaaaucccagaguucccuuucuauccaaccuguaacguuugcacugcugacgugaacguggcgaucaauuucgacgugggaggaaagaagcaucagcuugaucuggauuucggccaacugacgccacacaccaaagcgguguaccaaccaaggggugcauuuggagggagcgagaaugcugcgaaucuguucuuacuggaacugcuuggugcaggagagcuggcacuaaccaugcgaagcaagaagcuccccaucaacguugcgaccggggaagaacagcaagucagccuugaauccguggauguguacuuucaggauguuuucggcaccauguggugucaccacgcugagaugcagaaucccguguaucucauacccgagacuguacccuacaucaagugggauaauugcaauucagcgaauauugcggcuguggugagggcccagggcuuggacgugacucugcccuuaucucuaccuacuucugcccaagacuccaauuucgcggucaagaccgagaugcucgggaaugagaucgauaucgagugcaucauggaggacggugagauaagccagguucugcccggcgacaacaaguucaauaucgcguguucuggcuacgagucccaugugccuagugguggcauacucacaaguacuucucccguagccacgcccauucccggaaccggauacgccuacagucugcgucugaccccacggccuguguccagauuccuggguaacaaugcgaucuuauacguguuuuauagcggaaacggcccuaaagcguccggaggggacuauuguauucagaguaauaucguuuucucugaugagauuccugccagucaggacaugccgacaaacacagcggauauuaccuacgugggcgacaaugccgcguauucagugcccauggucacgagcgaggacgccaauucaccaaauguugcgguaacagcuuucugggccuggccaaauaacgcggagacugacuucaaauguaaguggacuuugaccucuggaacuccgucggguugcgagaauaucgcgggggccuuugcuuccaacagggcguucgacaucacugucucagggcuggggacagcaccgaagacauuaaucauaacacggaccgccaccaacgccgcgacuacaacccauaaggugaucuuuuccaaggcaccugaguccaccacuaccuccccgacucuuaacacugcgggcuucgcugaucccaacaccgcgacgggguugccuagcucgacacaugugccgacgaaccuggcggccccugcaucgaccgggcccacaguuucgaccgccgaugugacaucaccaacgcccgcagguacaaccucaggcgccagcccagugaccccuuccccaagccccugggauaauggaacggaguccaaggcuccugauaugacuuccucuaccagccccgugacuacacccacucccaacgcaacuagcccaaccccagcugugacgacgcccaccccgaacgcgacaucucccacaccugcugugacaaccccaaccccuaacgccacuagcccuacccuagguaagaccaguccgacuagcgccguuacaaccccuaccccuaacgcaaccggcccgaccgugggcgagacuuccccgcaagccaaugcgacaaaucacacauugggcgggaccucuccuacaccagucguuacaucucagccuaagaacgcuaccuccgcugucacuaccggacagcacaacaucaccagcucaagcacgaguuccaugagcuugcggccgagcucaaaucccgagacccuaucaccauccacaucagacaacaguacuucacacaugccacucuugacgagcgcucaccccaccggcggcgagaacaucacccaggugacuccggcgucuauuuccacccaccacgucagcacgucgucucccgcaccgagaccagggacgacuucucaggccagugggccuggcaacuccucuacaagcacaaagccaggcgaaguuaacgugacaaagggaacgccuccccagaacgcaaccaguccucaggcgcccagcgggcagaagacugcggugccaacugugaccagcaccgguggcaaggccaacucaacaacuggaggcaagcauacgacggggcacggcgcccggaccuccacugaacccacgaccgauuacggaggugacagcacaacaccgcggccacgauauaaugccaccacuuaucugccaccauccacaagcuccaagcugcggccacgguggaccuucacaagcccacccgugacgacugcccaagcgacggugccagugccaccuacaagccagccacgcuucuccaaccuuaguaugcucguucuccagugggccagccuugcuguucugacccuccuccugcugcucgugauggccgauugcgccuuuaggagaaaccucagcacuagccacacguacaccacgccgcccuacgaugacgccgagacuuacgucugauaauaggcuggagccucgguggccaugcuucuugccccuugggccuccccccagccccuccuccccuuccugcacccguacccccguggucuuugaauaaagucugagugggcggc

SEQ ID NO: 170 - RNA, 2761 nt, Artificial Sequence
  Synthetic Polynucleotide
gggaaauaagagagaaaagaagaguaagaagaaauauaagagccaccauggaggcagcacugcuggucugccaguauacaauccagucgcucauucaucugacaggcgaggaccccggcuucuuuaacguggaaaucccagaguucccuuucuauccaaccuguaacguuugcacugcugacgugaacgugacaaucaauuucgacgugggaggaaagaagcaucagcuugaucuggauuucggccaacugacgccacacaccaaagcgguguaccaaccaaggggugcauuuggagggagcgagaaugcugcgaaucuguucuuacuggaacugcuuggugcaggagagcuggcacuaaccaugcgaagcaagaagcuccccaucaacguuaccaccggggaagaacagcaagucagccuugaauccguggauguguacuuucaggauguuuucggcaccauguggugucaccacgcugagaugcagaaucccguguaucucauacccgagacuguacccuacaucaagugggauaauugcaauucaacuaauauuacggcuguggugagggcccagggcuuggacgugacucugcccuuaucucuaccuacuucugcccaagacuccaauuucucugucaagaccgagaugcucgggaaugagaucgauaucgagugcaucauggaggacggugagauaagccagguucugcccggcgacaacaaguucaauaucacuuguucuggcuacgagucccaugugccuagugguggcauacucacaaguacuucucccguagccacgcccauucccggaaccggauacgccuacagucugcgucugaccccacggccuguguccagauuccuggguaacaauaguaucuuauacguguuuuauagcggaaacggcccuaaagcguccggaggggacuauuguauucagaguaauaucguuuucucugaugagauuccugccagucaggacaugccgacaaacacaacugauauuaccuacgugggcgacaaugccacguauucagugcccauggucacgagcgaggacgccaauucaccaaauguuacuguaacagcuuucugggccuggccaaauaacacugagacugacuucaaauguaaguggacuuugaccucuggaacuccgucggguugcgagaauaucagcggggccuuugcuuccaacaggacuuucgacaucacugucucagggcuggggacagcaccgaagacauuaaucauaacacggaccgccaccaacgccacgacuacaacccauaaggugaucuuuuccaaggcaccugaguccaccacuaccuccccgacucuuaacacuacgggcuucgcugaucccaacaccacuacgggguugccuagcucgacacaugugccgacgaaccugacugccccugcaucgaccgggcccacaguuucgaccgccgaugugacaucaccaacgcccgcagguacaaccucaggcgccagcccagugaccccuuccccaagccccugggauaauggaacggaguccaaggcuccugauaugacuuccucuaccagccccgugacuacacccacucccaacgcaacuagcccaaccccagcugugacgacgcccaccccgaacgcgacaucucccacaccugcugugacaaccccaaccccuaacgccacuagcccuacccuagguaagaccaguccgacuagcgccguuacaaccccuaccccuaacgcaaccggcccgaccgugggcgagacuuccccgcaagccaaugcgacaaaucacacauugggcgggaccucuccuacaccagucguuacaucucagccuaagaacgcuaccuccgcugucacuaccggacagcacaacaucaccagcucaagcacgaguuccaugagcuugcggccgagcucaaaucccgagacccuaucaccauccacaucagacaacaguacuucacacaugccacucuugacgagcgcucaccccaccggcggcgagaacaucacccaggugacuccggcgucuauuuccacccaccacgucagcacgucgucucccgcaccgagaccagggacgacuucucaggccagugggccuggcaacuccucuacaagcacaaagccaggcgaaguuaacgugacaaagggaacgccuccccagaacgcaaccaguccucaggcgcccagcgggcagaagacugcggugccaacugugaccagcaccgguggcaaggccaacucaacaacuggaggcaagcauacgacggggcacggcgcccggaccuccacugaacccacgaccgauuacggaggugacagcacaacaccgcggccacgauauaaugccaccacuuaucugccaccauccacaagcuccaagcugcggccacgguggaccuucacaagcccacccgugacgacugcccaagcgacggugccagugccaccuacaagccagccacgcuucuccaaccuuaguaugcucguucuccagugggccagccuugcuguucugacccuccuccugcugcucgugauggccgauugcgccuuuaggagaaaccucagcacuagccacacguacaccacgccgcccuacgaugacgccgagacuuacgucugauaauaggcuggagccucgguggccaugcuucuugccccuugggccuccccccagccccuccuccccuuccugcacccguacccccguggucuuugaauaaagucugagugggcggc

SEQ ID NO: 171 - RNA, 2761 nt, Artificial Sequence
  Synthetic Polynucleotide
gggaaauaagagagaaaagaagaguaagaagaaauauaagagccaccauggaggcagcacugcuggucugccaguauacaauccagucgcucauucaucugacaggcgaggaccccggcuucuuuaacguggaaaucccagaguucccuuucuauccaaccuguaacguuugcacugcugacgugaacgugacaaucaauuucgacgugggaggaaagaagcaucagcuugaucuggauuucggccaacugacgccacacaccaaagcgguguaccaaccaaggggugcauuuggagggagcgagaaugcuacaaaucuguucuuacuggaacugcuuggugcaggagagcuggcacuaaccaugcgaagcaagaagcuccccaucaacguuaccaccggggaagaacagcaagucagccuugaauccguggauguguacuuucaggauguuuucggcaccauguggugucaccacgcugagaugcagaaucccguguaucucauacccgagacuguacccuacaucaagugggauaauugcaauucagcgaauauuacggcuguggugagggcccagggcuuggacgugacucugcccuuaucucuaccuacuucugcccaagacuccaauuucucugucaagaccgagaugcucgggaaugagaucgauaucgagugcaucauggaggacggugagauaagccagguucugcccggcgacaacaaguucaauaucacuuguucuggcuacgagucccaugugccuagugguggcauacucacaaguacuucucccguagccacgcccauucccggaaccggauacgccuacagucugcgucugaccccacggccuguguccagauuccuggguaacaauaguaucuuauacguguuuuauagcggaaacggcccuaaagcguccggaggggacuauuguauucagaguaauaucguuuucucugaugagauuccugccagucaggacaugccgacaaacacaacugauauuaccuacgugggcgacaaugccacguauucagugcccauggucacgagcgaggacgccaauucaccaaauguuacuguaacagcuuucugggccuggccaaauaacacugagacugacuucaaauguaaguggacuuugaccucuggaacuccgucggguugcgagaauaucagcggggccuuugcuuccaacaggacuuucgacaucacugucucagggcuggggacagcaccgaagacauuaaucauaacacggaccgccaccaacgccacgacuacaacccauaaggugaucuuuuccaaggcaccugaguccaccacuaccuccccgacucuuaacacuacgggcuucgcugaucccaacaccacuacgggguugccuagcucgacacaugugccgacgaaccugacugccccugcaucgaccgggcccacaguuucgaccgccgaugugacaucaccaacgcccgcagguacaaccucaggcgccagcccagugaccccuuccccaagccccugggauaauggaacggaguccaaggcuccugauaugacuuccucuaccagccccgugacuacacccacucccaacgcaacuagcccaaccccagcugugacgacgcccaccccgaacgcgacaucucccacaccugcugugacaaccccaaccccuaacgccacuagcccuacccuagguaagaccaguccgacuagcgccguuacaaccccuaccccuaacgcaaccggcccgaccgugggcgagacuuccccgcaagccaaugcgacaaaucacacauugggcgggaccucuccuacaccagucguuacaucucagccuaagaacgcuaccuccgcugucacuaccggacagcacaacaucaccagcucaagcacgaguuccaugagcuugcggccgagcucaaaucccgagacccuaucaccauccacaucagacaacaguacuucacacaugccacucuugacgagcgcucaccccaccggcggcgagaacaucacccaggugacuccggcgucuauuuccacccaccacgucagcacgucgucucccgcaccgagaccagggacgacuucucaggccagugggccuggcaacuccucuacaagcacaaagccaggcgaaguuaacgugacaaagggaacgccuccccagaacgcaaccaguccucaggcgcccagcgggcagaagacugcggugccaacugugaccagcaccgguggcaaggccaacucaacaacuggaggcaagcauacgacggggcacggcgcccggaccuccacugaacccacgaccgauuacggaggugacagcacaacaccgcggccacgauauaaugccaccacuuaucugccaccauccacaagcuccaagcugcggccacgguggaccuucacaagcccacccgugacgacugcccaagcgacggugccagugccaccuacaagccagccacgcuucuccaaccuuaguaugcucguucuccagugggccagccuugcuguucugacccuccuccugcugcucgugauggccgauugcgccuuuaggagaaaccucagcacuagccacacguacaccacgccgcccuacgaugacgccgagacuuacgucugauaauaggcuggagccucgguggccaugcuucuugccccuugggccuccccccagccccuccuccccuuccugcacccguacccccguggucuuugaauaaagucugagugggcggc

SEQ ID NO: 172 - RNA, 2761 nt, Artificial Sequence
  Synthetic Polynucleotide
gggaaauaagagagaaaagaagaguaagaagaaauauaagagccaccauggaggcagcacugcuggucugccaguauacaauccagucgcucauucaucugacaggcgaggaccccggcuucuuuaacguggaaaucccagaguucccuuucuauccaaccuguaacguuugcacugcugacgugaacgugacaaucaauuucgacgugggaggaaagaagcaucagcuugaucuggauuucggccaacugacgccacacaccaaagcgguguaccaaccaaggggugcauuuggagggagcgagaaugcuacaaaucuguucuuacuggaacugcuuggugcaggagagcuggcacuaaccaugcgaagcaagaagcuccccaucaacguuaccaccggggaagaacagcaagucagccuugaauccguggauguguacuuucaggauguuuucggcaccauguggugucaccacgcugagaugcagaaucccguguaucucauacccgagacuguacccuacaucaagugggauaauugcaauucaacuaauauuacggcuguggugagggcccagggcuuggacgugacucugcccuuaucucuaccuacuucugcccaagacuccaauuucgcggucaagaccgagaugcucgggaaugagaucgauaucgagugcaucauggaggacggugagauaagccagguucugcccggcgacaacaaguucaauaucacuuguucuggcuacgagucccaugugccuagugguggcauacucacaaguacuucucccguagccacgcccauucccggaaccggauacgccuacagucugcgucugaccccacggccuguguccagauuccuggguaacaauaguaucuuauacguguuuuauagcggaaacggcccuaaagcguccggaggggacuauuguauucagaguaauaucguuuucucugaugagauuccugccagucaggacaugccgacaaacacaacugauauuaccuacgugggcgacaaugccacguauucagugcccauggucacgagcgaggacgccaauucaccaaauguuacuguaacagcuuucugggccuggccaaauaacacugagacugacuucaaauguaaguggacuuugaccucuggaacuccgucggguugcgagaauaucagcggggccuuugcuuccaacaggacuuucgacaucacugucucagggcuggggacagcaccgaagacauuaaucauaacacggaccgccaccaacgccacgacuacaacccauaaggugaucuuuuccaaggcaccugaguccaccacuaccuccccgacucuuaacacuacgggcuucgcugaucccaacaccacuacgggguugccuagcucgacacaugugccgacgaaccugacugccccugcaucgaccgggcccacaguuucgaccgccgaugugacaucaccaacgcccgcagguacaaccucaggcgccagcccagugaccccuuccccaagccccugggauaauggaacggaguccaaggcuccugauaugacuuccucuaccagccccgugacuacacccacucccaacgcaacuagcccaaccccagcugugacgacgcccaccccgaacgcgacaucucccacaccugcugugacaaccccaaccccuaacgccacuagcccuacccuagguaagaccaguccgacuagcgccguuacaaccccuaccccuaacgcaaccggcccgaccgugggcgagacuuccccgcaagccaaugcgacaaaucacacauugggcgggaccucuccuacaccagucguuacaucucagccuaagaacgcuaccuccgcugucacuaccggacagcacaacaucaccagcucaagcacgaguuccaugagcuugcggccgagcucaaaucccgagacccuaucaccauccacaucagacaacaguacuucacacaugccacucuugacgagcgcucaccccaccggcggcgagaacaucacccaggugacuccggcgucuauuuccacccaccacgucagcacgucgucucccgcaccgagaccagggacgacuucucaggccagugggccuggcaacuccucuacaagcacaaagccaggcgaaguuaacgugacaaagggaacgccuccccagaacgcaaccaguccucaggcgcccagcgggcagaagacugcggugccaacugugaccagcaccgguggcaaggccaacucaacaacuggaggcaagcauacgacggggcacggcgcccggaccuccacugaacccacgaccgauuacggaggugacagcacaacaccgcggccacgauauaaugccaccacuuaucugccaccauccacaagcuccaagcugcggccacgguggaccuucacaagcccacccgugacgacugcccaagcgacggugccagugccaccuacaagccagccacgcuucuccaaccuuaguaugcucguucuccagugggccagccuugcuguucugacccuccuccugcugcucgugauggccgauugcgccuuuaggagaaaccucagcacuagccacacguacaccacgccgcccuacgaugacgccgagacuuacgucugauaauaggcuggagccucgguggccaugcuucuugccccuugggccuccccccagccccuccuccccuuccugcacccguacccccguggucuuugaauaaagucugagugggcggc

SEQ ID NO: 173 - RNA, 2761 nt, Artificial Sequence
  Synthetic Polynucleotide
gggaaauaagagagaaaagaagaguaagaagaaauauaagagccaccauggaggcagcacugcuggucugccaguauacaauccagucgcucauucaucugacaggcgaggaccccggcuucuuuaacguggaaaucccagaguucccuuucuauccaaccuguaacguuugcacugcugacgugaacgugacaaucaauuucgacgugggaggaaagaagcaucagcuugaucuggauuucggccaacugacgccacacaccaaagcgguguaccaaccaaggggugcauuuggagggagcgagaaugcuacaaaucuguucuuacuggaacugcuuggugcaggagagcuggcacuaaccaugcgaagcaagaagcuccccaucaacguuaccaccggggaagaacagcaagucagccuugaauccguggauguguacuuucaggauguuuucggcaccauguggugucaccacgcugagaugcagaaucccguguaucucauacccgagacuguacccuacaucaagugggauaauugcaauucaacuaauauuacggcuguggugagggcccagggcuuggacgugacucugcccuuaucucuaccuacuucugcccaagacuccaauuucucugucaagaccgagaugcucgggaaugagaucgauaucgagugcaucauggaggacggugagauaagccagguucugcccggcgacaacaaguucaauaucgcguguucuggcuacgagucccaugugccuagugguggcauacucacaaguacuucucccguagccacgcccauucccggaaccggauacgccuacagucugcgucugaccccacggccuguguccagauuccuggguaacaauaguaucuuauacguguuuuauagcggaaacggcccuaaagcguccggaggggacuauuguauucagaguaauaucguuuucucugaugagauuccugccagucaggacaugccgacaaacacaacugauauuaccuacgugggcgacaaugccacguauucagugcccauggucacgagcgaggacgccaauucaccaaauguuacuguaacagcuuucugggccuggccaaauaacacugagacugacuucaaauguaaguggacuuugaccucuggaacuccgucggguugcgagaauaucagcggggccuuugcuuccaacaggacuuucgacaucacugucucagggcuggggacagcaccgaagacauuaaucauaacacggaccgccaccaacgccacgacuacaacccauaaggugaucuuuuccaaggcaccugaguccaccacuaccuccccgacucuuaacacuacgggcuucgcugaucccaacaccacuacgggguugccuagcucgacacaugugccgacgaaccugacugccccugcaucgaccgggcccacaguuucgaccgccgaugugacaucaccaacgcccgcagguacaaccucaggcgccagcccagugaccccuuccccaagccccugggauaauggaacggaguccaaggcuccugauaugacuuccucuaccagccccgugacuacacccacucccaacgcaacuagcccaaccccagcugugacgacgcccaccccgaacgcgacaucucccacaccugcugugacaaccccaaccccuaacgccacuagcccuacccuagguaagaccaguccgacuagcgccguuacaaccccuaccccuaacgcaaccggcccgaccgugggcgagacuuccccgcaagccaaugcgacaaaucacacauugggcgggaccucuccuacaccagucguuacaucucagccuaagaacgcuaccuccgcugucacuaccggacagcacaacaucaccagcucaagcacgaguuccaugagcuugcggccgagcucaaaucccgagacccuaucaccauccacaucagacaacaguacuucacacaugccacucuugacgagcgcucaccccaccggcggcgagaacaucacccaggugacuccggcgucuauuuccacccaccacgucagcacgucgucucccgcaccgagaccagggacgacuucucaggccagugggccuggcaacuccucuacaagcacaaagccaggcgaaguuaacgugacaaagggaacgccuccccagaacgcaaccaguccucaggcgcccagcgggcagaagacugcggugccaacugugaccagcaccgguggcaaggccaacucaacaacuggaggcaagcauacgacggggcacggcgcccggaccuccacugaacccacgaccgauuacggaggugacagcacaacaccgcggccacgauauaaugccaccacuuaucugccaccauccacaagcuccaagcugcggccacgguggaccuucacaagcccacccgugacgacugcccaagcgacggugccagugccaccuacaagccagccacgcuucuccaaccuuaguaugcucguucuccagugggccagccuugcuguucugacccuccuccugcugcucgugauggccgauugcgccuuuaggagaaaccucagcacuagccacacguacaccacgccgcccuacgaugacgccgagacuuacgucugauaauaggcuggagccucgguggccaugcuucuugccccuugggccuccccccagccccuccuccccuuccugcacccguacccccguggucuuugaauaaagucugagugggcggc

SEQ ID NO: 174 - RNA, 2761 nt, Artificial Sequence
  Synthetic Polynucleotide
gggaaauaagagagaaaagaagaguaagaagaaauauaagagccaccauggaggcagcacugcuggucugccaguauacaauccagucgcucauucaucugacaggcgaggaccccggcuucuuuaacguggaaaucccagaguucccuuucuauccaaccuguaacguuugcacugcugacgugaacgugacaaucaauuucgacgugggaggaaagaagcaucagcuugaucuggauuucggccaacugacgccacacaccaaagcgguguaccaaccaaggggugcauuuggagggagcgagaaugcuacaaaucuguucuuacuggaacugcuuggugcaggagagcuggcacuaaccaugcgaagcaagaagcuccccaucaacguuaccaccggggaagaacagcaagucagccuugaauccguggauguguacuuucaggauguuuucggcaccauguggugucaccacgcugagaugcagaaucccguguaucucauacccgagacuguacccuacaucaagugggauaauugcaauucaacuaauauuacggcuguggugagggcccagggcuuggacgugacucugcccuuaucucuaccuacuucugcccaagacuccaauuucucugucaagaccgagaugcucgggaaugagaucgauaucgagugcaucauggaggacggugagauaagccagguucugcccggcgacaacaaguucaauaucacuuguucuggcuacgagucccaugugccuagugguggcauacucacaaguacuucucccguagccacgcccauucccggaaccggauacgccuacagucugcgucugaccccacggccuguguccagauuccuggguaacaauaguaucuuauacguguuuuauagcggaaacggcccuaaagcguccggaggggacuauuguauucagaguaauaucguuuucucugaugagauuccugccagucaggacaugccgacaaacacaacugauauuaccuacgugggcgacaaugccacguauucagugcccauggucacgagcgaggacgccaauucaccaaauguugcgguaacagcuuucugggccuggccaaauaacacugagacugacuucaaauguaaguggacuuugaccucuggaacuccgucggguugcgagaauaucagcggggccuuugcuuccaacaggacuuucgacaucacugucucagggcuggggacagcaccgaagacauuaaucauaacacggaccgccaccaacgccacgacuacaacccauaaggugaucuuuuccaaggcaccugaguccaccacuaccuccccgacucuuaacacuacgggcuucgcugaucccaacaccacuacgggguugccuagcucgacacaugugccgacgaaccugacugccccugcaucgaccgggcccacaguuucgaccgccgaugugacaucaccaacgcccgcagguacaaccucaggcgccagcccagugaccccuuccccaagccccugggauaauggaacggaguccaaggcuccugauaugacuuccucuaccagccccgugacuacacccacucccaacgcaacuagcccaaccccagcugugacgacgcccaccccgaacgcgacaucucccacaccugcugugacaaccccaaccccuaacgccacuagcccuacccuagguaagaccaguccgacuagcgccguuacaaccccuaccccuaacgcaaccggcccgaccgugggcgagacuuccccgcaagccaaugcgacaaaucacacauugggcgggaccucuccuacaccagucguuacaucucagccuaagaacgcuaccuccgcugucacuaccggacagcacaacaucaccagcucaagcacgaguuccaugagcuugcggccgagcucaaaucccgagacccuaucaccauccacaucagacaacaguacuucacacaugccacucuugacgagcgcucaccccaccggcggcgagaacaucacccaggugacuccggcgucuauuuccacccaccacgucagcacgucgucucccgcaccgagaccagggacgacuucucaggccagugggccuggcaacuccucuacaagcacaaagccaggcgaaguuaacgugacaaagggaacgccuccccagaacgcaaccaguccucaggcgcccagcgggcagaagacugcggugccaacugugaccagcaccgguggcaaggccaacucaacaacuggaggcaagcauacgacggggcacggcgcccggaccuccacugaacccacgaccgauuacggaggugacagcacaacaccgcggccacgauauaaugccaccacuuaucugccaccauccacaagcuccaagcugcggccacgguggaccuucacaagcccacccgugacgacugcccaagcgacggugccagugccaccuacaagccagccacgcuucuccaaccuuaguaugcucguucuccagugggccagccuugcuguucugacccuccuccugcugcucgugauggccgauugcgccuuuaggagaaaccucagcacuagccacacguacaccacgccgcccuacgaugacgccgagacuuacgucugauaauaggcuggagccucgguggccaugcuucuugccccuugggccuccccccagccccuccuccccuuccugcacccguacccccguggucuuugaauaaagucugagugggcggc

SEQ ID NO: 175 - RNA, 2761 nt, Artificial Sequence
  Synthetic Polynucleotide
gggaaauaagagagaaaagaagaguaagaagaaauauaagagccaccauggaggcagcacugcuggucugccaguauacaauccagucgcucauucaucugacaggcgaggaccccggcuucuuuaacguggaaaucccagaguucccuuucuauccaaccuguaacguuugcacugcugacgugaacgugacaaucaauuucgacgugggaggaaagaagcaucagcuugaucuggauuucggccaacugacgccacacaccaaagcgguguaccaaccaaggggugcauuuggagggagcgagaaugcuacaaaucuguucuuacuggaacugcuuggugcaggagagcuggcacuaaccaugcgaagcaagaagcuccccaucaacguuaccaccggggaagaacagcaagucagccuugaauccguggauguguacuuucaggauguuuucggcaccauguggugucaccacgcugagaugcagaaucccguguaucucauacccgagacuguacccuacaucaagugggauaauugcaauucaacuaauauuacggcuguggugagggcccagggcuuggacgugacucugcccuuaucucuaccuacuucugcccaagacuccaauuucucugucaagaccgagaugcucgggaaugagaucgauaucgagugcaucauggaggacggugagauaagccagguucugcccggcgacaacaaguucaauaucacuuguucuggcuacgagucccaugugccuagugguggcauacucacaaguacuucucccguagccacgcccauucccggaaccggauacgccuacagucugcgucugaccccacggccuguguccagauuccuggguaacaauaguaucuuauacguguuuuauagcggaaacggcccuaaagcguccggaggggacuauuguauucagaguaauaucguuuucucugaugagauuccugccagucaggacaugccgacaaacacaacugauauuaccuacgugggcgacaaugccacguauucagugcccauggucacgagcgaggacgccaauucaccaaauguuacuguaacagcuuucugggccuggccaaauaacacugagacugacuucaaauguaaguggacuuugaccucuggaacuccgucggguugcgagaauaucagcggggccuuugcuuccaacaggacuuucgacaucacugucucagggcuggggacagcaccgaagacauuaaucauaacacggaccgccaccaacgccgcgacuacaacccauaaggugaucuuuuccaaggcaccugaguccaccacuaccuccccgacucuuaacacuacgggcuucgcugaucccaacaccacuacgggguugccuagcucgacacaugugccgacgaaccugacugccccugcaucgaccgggcccacaguuucgaccgccgaugugacaucaccaacgcccgcagguacaaccucaggcgccagcccagugaccccuuccccaagccccugggauaauggaacggaguccaaggcuccugauaugacuuccucuaccagccccgugacuacacccacucccaacgcaacuagcccaaccccagcugugacgacgcccaccccgaacgcgacaucucccacaccugcugugacaaccccaaccccuaacgccacuagcccuacccuagguaagaccaguccgacuagcgccguuacaaccccuaccccuaacgcaaccggcccgaccgugggcgagacuuccccgcaagccaaugcgacaaaucacacauugggcgggaccucuccuacaccagucguuacaucucagccuaagaacgcuaccuccgcugucacuaccggacagcacaacaucaccagcucaagcacgaguuccaugagcuugcggccgagcucaaaucccgagacccuaucaccauccacaucagacaacaguacuucacacaugccacucuugacgagcgcucaccccaccggcggcgagaacaucacccaggugacuccggcgucuauuuccacccaccacgucagcacgucgucucccgcaccgagaccagggacgacuucucaggccagugggccuggcaacuccucuacaagcacaaagccaggcgaaguuaacgugacaaagggaacgccuccccagaacgcaaccaguccucaggcgcccagcgggcagaagacugcggugccaacugugaccagcaccgguggcaaggccaacucaacaacuggaggcaagcauacgacggggcacggcgcccggaccuccacugaacccacgaccgauuacggaggugacagcacaacaccgcggccacgauauaaugccaccacuuaucugccaccauccacaagcuccaagcugcggccacgguggaccuucacaagcccacccgugacgacugcccaagcgacggugccagugccaccuacaagccagccacgcuucuccaaccuuaguaugcucguucuccagugggccagccuugcuguucugacccuccuccugcugcucgugauggccgauugcgccuuuaggagaaaccucagcacuagccacacguacaccacgccgcccuacgaugacgccgagacuuacgucugauaauaggcuggagccucgguggccaugcuucuugccccuugggccuccccccagccccuccuccccuuccugcacccguacccccguggucuuugaauaaagucugagugggcggc

SEQ ID NO: 176 - RNA, 835 nt, Artificial Sequence; identical to SEQ ID NO: 155
  Synthetic Polynucleotide

SEQ ID NO: 177 - RNA, 2998 nt, Artificial Sequence; identical to SEQ ID NO: 161
  Synthetic Polynucleotide

SEQ ID NO: 178 - RNA, 892 nt, Artificial Sequence; identical to SEQ ID NO: 160
  Synthetic Polynucleotide

SEQ ID NO: 179 - RNA, 1324 nt, Artificial Sequence; identical to SEQ ID NO: 158
  Synthetic Polynucleotide

SEQ ID NO: 180 - RNA, 1657 nt, Artificial Sequence; identical to SEQ ID NO: 159
  Synthetic Polynucleotide

SEQ ID NO: 181 - RNA, 1657 nt, Artificial Sequence; identical to SEQ ID NO: 159
  Synthetic Polynucleotide

SEQ ID NO: 182 - RNA, 2761 nt, Artificial Sequence
  Synthetic Polynucleotide
gggaaauaagagagaaaagaagaguaagaagaaauauaagagccaccauggaagccgcucuucuggucugccaguauacaauccagucgcugauucaucucaccggcgaggauccagguuucuuuaacguggagauuccagaauucccuuucuauccaacuuguaacguguguacugccgacguuaacguuacuauuaacuuugacgugggcggaaagaagcaccagcuggaucuugauuucggccagcuaacaccucauaccaaggccgucuaccaaccacgcggggcauuuggcgguucugagaaugcuacaaaccuguuccuuuuggaacuccucggagcaggggaacuggcacuuacaaugaggaguaagaagcugcccaucaacgucaccacgggugaagaacagcaggugucccuggaguccguugauguguauuuccaggacguuuucgggacaauguggugucaucaugccgaaaugcagaauccgguguaucucauuccugagaccgugcccuauauuaaaugggauaacuguaauucgacaaacauaacugccguagugcgugcccagggucuggauguaacuuugccucucucccuucccacuucugcccaggacuccaauuucucagugaagaccgaaaugcuugggaacgagaucgacaucgaguguaucauggaggauggggagaucagucagguguugccuggugacaauaaguuuaauauaacauguuccggcuaugaaucacauguuccaagcggagguauucucacaaguacaucucccguagccacgccgauuccgggaaccggauacgccuauucacuucggcugacuccucggccagugucacgauuccugggcaauaacucaauucuguacgucuuuuacagcggcaacggcccaaaggccaguggaggcgauuacuguauccagucuaacaucguauuuucagaugagauuccagcaagccaagacaugccaacuaauacuacagacauuacauacgucggugauaacgccacuuauucagucccuauggucacauccgaggacgcgaacucacccaauguuaccguuaccgcauucugggcauggcccaauaauacggaaacagacuucaaauguaaguggacccugaccaguggcaccccuucuggcugcgagaauauaagcggggcauuugcuagcaacagaacauucgauauuacugugucuggccuggggaccgcgcccaagacacucauuauaacgcgaacagcuacgaacgcuaccacaaccacacauaaagugauuuucagcaaggcuccagaaucaacuacaaccaguccgacccuuaauaccacaggcuucgcagacccgaacacaacgacgggacugcccuccucaacgcaugugccgacuaaucugacugcucccgcaaguaccggcccaacagucuccacagcagacgucaccucuccgacucccgccggcacuacaucuggagccucaccggugacuccuaguccuucgcccugggacaaugggaccgagucuaaagccccggacaugacgaguucuaccucaccaguuacaaccccaacaccuaaugccacaagcccuacgccagccgugaccaccccuacgcccaaugccaccagcccaacacccgcuguuacaacgccaacgcccaacgcuacuucuccaacgcuaggaaagacaucacccaccucagcuguaaccacgcccacaccaaacgcuaccgggccaaccguuggcgaaaccucgccccaggccaaugcgacaaaccacacccuuggcgggacuucucccacuccuguggugacuucacaaccgaagaacgcgacgucggccguuacgaccgggcagcacaauaucaccucguccuccacgucguccauguccuugcggccuuccaguaacccagagacacugucuccuaguaccagugacaacagcaccucucacaugccauuacugacuuccgcccacccaaccggcggagagaacaucacucaggugacgcccgcaucuauuucuacccaccacgugagcacuagcagcccggcaccaagaccagggaccaccucccaggcuagcggcccgggcaacuccuccacuagcacgaaaccaggagaggugaacgugaccaagggcacaccgccacagaaugcaacuuccccacaggcgcccuccggccagaagacugcuguaccuacggucacuagcacuggcggaaaggcgaauucaaccaccggugguaagcauaccaccggacacggcgcucggacuagcacagagccaaccacugauuacggaggugacucaacgaccccgaggcccagguacaacgcaaccaccuaucucccaccauccacaucuuccaagcucaggccucguuggacuuucaccuccccgccugugacuacagcgcaggccacagugccagugccuccaacgucacagccgcgguuuagcaaucucuccaugcugguccugcagugggcaucucuggcaguccugacacugcuucuuuugcucgugauggccgauugugcguuuagacgcaaccuuucaacaucccacacauauacaacuccacccuaugaugacgcagagacuuaugugugauaauaggcuggagccucgguggccaugcuucuugccccuugggccuccccccagccccuccuccccuuccugcacccguacccccguggucuuugaauaaagucugagugggcggc

SEQ ID NO: 183 - RNA, 2284 nt, Artificial Sequence; identical to SEQ ID NO: 157
  Synthetic Polynucleotide

SEQ ID NO: 184 - RNA, 577 nt, Artificial Sequence; identical to SEQ ID NO: 156
  Synthetic Polynucleotide

SEQ ID NO: 185 - RNA, 2761 nt, Artificial Sequence
  Synthetic Polynucleotide
gggaaauaagagagaaaagaagaguaagaagaaauauaagagccaccauggaggcagcacugcuggucugccaguauacaauccagucgcucauucaucugacaggcgaggaccccggcuucuuuaacguggaaaucccagaguucccuuucuauccaaccuguaacguuugcacugcugacgugaacgugacaaucaauuucgacgugggaggaaagaagcaucagcuugaucuggauuucggccaacugacgccacacaccaaagcgguguaccaaccaaggggugcauuuggagggagcgagaaugcuacaaaucuguucuuacuggaacugcuuggugcaggagagcuggcacuaaccaugcgaagcaagaagcuccccaucaacguuaccaccggggaagaacagcaagucagccuugaauccguggauguguacuuucaggauguuuucggcaccauguggugucaccacgcugagaugcagaaucccguguaucucauacccgagacuguacccuacaucaagugggauaauugcaauucaacuaauauuacggcuguggugagggcccagggcuuggacgugacucugcccuuaucucuaccuacuucugcccaagacuccaauuucucugucaagaccgagaugcucgggaaugagaucgauaucgagugcaucauggaggacggugagauaagccagguucugcccggcgacaacaaguucaauaucacuuguucuggcuacgagucccaugugccuagugguggcauacucacaaguacuucucccguagccacgcccauucccggaaccggauacgccuacagucugcgucugaccccacggccuguguccagauuccuggguaacaauaguaucuuauacguguuuuauagcggaaacggcccuaaagcguccggaggggacuauuguauucagaguaauaucguuuucucugaugagauuccugccagucaggacaugccgacaaacacaacugauauuaccuacgugggcgacaaugccacguauucagugcccauggucacgagcgaggacgccaauucaccaaauguuacuguaacagcuuucugggccuggccaaauaacacugagacugacuucaaauguaaguggacuuugaccucuggaacuccgucggguugcgagaauaucagcggggccuuugcuuccaacaggacuuucgacaucacugucucagggcuggggacagcaccgaagacauuaaucauaacacggaccgccaccaacgccacgacuacaacccauaaggugaucuuuuccaaggcaccugaguccaccacuaccuccccgacucuuaacacuacgggcuucgcugaucccaacaccacuacgggguugccuagcucgacacaugugccgacgaaccugacugccccugcaucgaccgggcccacaguuucgaccgccgaugugacaucaccaacgcccgcagguacaaccucaggcgccagcccagugaccccuuccccaagccccugggauaauggaacggaguccaaggcuccugauaugacuuccucuaccagccccgugacuacacccacucccaacgcaacuagcccaaccccagcugugacgacgcccaccccgaacgcgacaucucccacaccugcugugacaaccccaaccccuaacgccacuagcccuacccuagguaagaccaguccgacuagcgccguuacaaccccuaccccuaacgcaaccggcccgaccgugggcgagacuuccccgcaagccaaugcgacaaaucacacauugggcgggaccucuccuacaccagucguuacaucucagccuaagaacgcuaccuccgcugucacuaccggacagcacaacaucaccagcucaagcacgaguuccaugagcuugcggccgagcucaaaucccgagacccuaucaccauccacaucagacaacaguacuucacacaugccacucuugacgagcgcucaccccaccggcggcgagaacaucacccaggugacuccggcgucuauuuccacccaccacgucagcacgucgucucccgcaccgagaccagggacgacuucucaggccagugggccuggcaacuccucuacaagcacaaagccaggcgaaguuaacgugacaaagggaacgccuccccagaacgcaaccaguccucaggcgcccagcgggcagaagacugcggugccaacugugaccagcaccgguggcaaggccaacucaacaacuggaggcaagcauacgacggggcacggcgcccggaccuccacugaacccacgaccgauuacggaggugacagcacaacaccgcggccacgauauaaugccaccacuuaucugccaccauccacaagcuccaagcugcggccacgguggaccuucacaagcccacccgugacgacugcccaagcgacggugccagugccaccuacaagccagccacgcuucuccaaccuuaguaugcucguucuccagugggccagccuugcuguucugacccuccuccugcugcucgugauggccgauugcgccuuuaggagaaaccucagcacuagccacacguacaccacgccgcccuacgaugacgccgagacuuacgucugauaauaggcuggagccucgguggccaugcuucuugccccuugggccuccccccagccccuccuccccuuccugcacccguacccccguggucuuugaauaaagucugagugggcggc

SEQ ID NO: 186 - RNA, 1195 nt, Artificial Sequence
  Synthetic Polynucleotide
gggaaauaagagagaaaagaagaguaagaagaaauauaagagccaccaugagugacuggacaggaggagcccuccuuguccucuauuccuuugcucucaugcuuauaauuaucauccugauaaucuuuaucuucagacgggaccuucucuguccacuuggagcccuuuguauacuccuauugaugaucacccuccuccucaucgcucucuggaauuugcacggacaggcauuguuccuuggaauugugcuguucaucuucgggugcuuacuugucuuagguaucuggaucuacuuauuggagaugcucuggcgacuuggugccaccaucuggcagcuuuuggccuucuuccuagcguucuuccucgaccucauucuacucauuauugcucucuaucuacaacagaacugguggacucuauugguugaucuccuuuggcuccuccuguuucuggcgauuuuaaucuggauguauuaccauggacaacgacacagugaugaacaccaccacgaugacucccucccgcacccucaacaagcuaccgaugauucuggccaugaaucugacucuaacuccaacgagggcagacaccaccugcucgugaguggagccggcgacggaccaccacucugcucucagaaccuaggcgcaccuggaggugguccugacaauggcccacaggacccugacaacacggaugauaacgguccacaagacccagauaacacugacgacaauggaccgcaugacccgcugccucaggauccugauaacacagacgacaacggcccacaagauccggacaauaccgacgauaacggaccgcacgacccguuaccucauagcccuagcgacucugcuggaaaugauggaggcccuccacaauugacggaagagguugagaacaaaggaggugaccagggcccgccuuugaugacagacggaggcggcggucauagucaugauuccggccauggcggaggagauccacaccuuccuacgcugcuguuggguucuucugguuccgguggagaugaugacgacccgcacggcccaguucagcuaagcuacuaugacugauaauaggcuggagccucgguggccaugcuucuugccccuugggccuccccccagccccuccuccccuuccugcacccguacccccguggucuuugaauaaagucugagugggcggc

SEQ ID NO: 187 - RNA, 2284 nt, Artificial Sequence; identical to SEQ ID NO: 157
  Synthetic Polynucleotide

SEQ ID NO: 188 - RNA, 577 nt, Artificial Sequence; identical to SEQ ID NO: 156
  Synthetic Polynucleotide

SEQ ID NO: 189 - RNA, 835 nt, Artificial Sequence; identical to SEQ ID NO: 155
  Synthetic Polynucleotide

SEQ ID NO: 190 - RNA, 2047 nt, Artificial Sequence
  Synthetic Polynucleotide
gggaaauaagagagaaaagaagaguaagaagaaauauaagagccaccauggacagcaagggcagcagccagaagggaagcagguuguuauugcuuuuaguggugagcaacuuacucuuaccccagggcgugguggaggcagcacuccucgucugccaguauacaauccagucgcucauucauuugacaggcgaggaccccggcuucuuuaacguggaaaucccagaguucccuuucuauccaaccuguaacguuugcacagccgacgugaacgugacaaucaauuucgacgugggaggaaagaagcaucagcuugaucuggauuucggccaacugacgccacacaccaaagcgguguaccaaccaaggggugcauuuggagggagcgagaaugcuacaaaucuguucuuacuggaacugcuuggugcaggagagcuggcacuaaccaugcgaagcaagaagcuccccaucaacguuaccaccggggaagaacagcaagucagccuugaauccguggauguguacuuucaggauguuuucggcaccauguggugucaccacgcugagaugcagaaucccguguaucucauacccgagacuguacccuacaucaagugggauaauugcaauucaacuaauauuacggcuguggugagggcccagggcuuggacgugacucugcccuuaucucuaccuacuucugcccaagacuccaauuucucugucaagaccgagaugcucgggaaugagaucgauaucgagugcaucauggaggacggugagauaagccagguucugcccggcgacaacaaguucaauaucacuuguucuggcuacgagucccaugugccuagugguggcauacucacaaguacuucucccguagccacgcccauucccggaaccggauacgccuacagucugcgucugaccccacggccuguguccagauuccuggguaacaauaguaucuuauacguguuuuauagcggaaacggcccuaaagcguccggaggggacuauuguauucagaguaauaucguuuucucugaugagaucccugccagucaggacaugccgacaaacacaacugauauuaccuacgugggcgacaaugccacguauucagugcccauggucacgagcgaggacgccaauucaccaaauguuacuguaacagcuuucugggccuggccaaauaacacugagacugacuucaaauguaaguggacuuugaccucuggaacuccgucggguugcgagaauaucagcggggccuuugcuuccaacaggacuuucgacaucacugucucagggcuggggacagcaccgaagacauuaaucauaacacggaccgccaccaacgccacgacuacaacccauaaggugaucuuuuccaaggcaccuggcagcggcagcgcaggcucugcaagcggcggcgccuccagcggcuccggaggugccagcaugcagaucuacgagggcaagcugaccgccgagggccugagguucggcaucguggccagcagguucaaccacgcccugguggacaggcugguggaaggcgccaucgacgccaucgugaggcacggcggcagggaggaggacaucacccuggugcgggugcccggcagcugggagauccccguggccgccggcgagcuggccaggaaggaagauauugaugcagugaucgccaucggcgugcugaucaggggcgccaccccacacuucgacuacaucgccagcgaagugagcaagggacuggcggaccugagccuggagcugaggaagcccaucaccuucggcgugaucaccgccgacacccuggagcaggccaucgagagggccggcaccaagcacggcaacaagggaugggaggccgcccugagcgcuaucgaaauggccaaccucuucaagagccugaggugauaauaggcuggagccucgguggccaugcuucuugccccuugggccuccccccagccccuccuccccuuccugcacccguacccccguggucuuugaauaaagucugagugggcggc

SEQ ID NO: 191 - RNA, 2263 nt, Artificial Sequence
  Synthetic Polynucleotide
gggaaauaagagagaaaagaagaguaagaagaaauauaagagccaccauggacagcaagggcagcagccagaagggcaguaggcuccuuuugcuacuuguggugagcaaccucuuguuaccccagggcgugguggaggcagcacuccucgucugccaguauacaauccagucgcucauucauuugacaggcgaggaccccggcuucuuuaacguggaaaucccagaguucccuuucuauccaaccuguaacguuugcacggcagacgugaacgugacaaucaauuucgacgugggaggaaagaagcaucagcuugaucuggauuucggccaacugacgccacacaccaaagcgguguaccaaccaaggggugcauuuggagggagcgagaaugcuacaaaucuguucuuacuggaacugcuuggugcaggagagcuggcacuaaccaugcgaagcaagaagcuccccaucaacguuaccaccggggaagaacagcaagucagccuugaauccguggauguguacuuucaggauguuuucggcaccauguggugucaccacgcugagaugcagaaucccguguaucucauacccgagacuguacccuacaucaagugggauaauugcaauucaacuaauauuacggcuguagugagggcccagggcuuggacgugacucugcccuuaucucuaccuacuucugcccaagacuccaauuucucugucaagaccgagaugcucgggaaugagaucgauaucgagugcaucauggaggacggugagauaagccagguucugcccggcgacaacaaguucaauaucacuuguucuggcuacgagucccaugugccuagugguggcauacucacaaguacuucucccguagccacgcccauucccggaaccggauacgccuacagucugcgucugaccccacggccuguguccagauuccuggguaacaauaguaucuuauacguguuuuauagcggaaacggcccuaaagcguccggaggggacuauuguauucagaguaauaucguuuucucugaugagauuccagccagucaggacaugccgacaaacacaacugauauuaccuacgugggcgacaaugccacguauucagugcccauggucacgagcgaggacgccaauucaccaaauguuacuguaacagcuuucugggccuggccaaauaacacugagacugacuucaaauguaaguggacuuugaccucuggaacuccgucggguugcgagaauaucagcggggccuuugcuuccaacaggacuuucgacaucacugucucagggcuggggacagcaccgaagacauuaaucauaacacggaccgccaccaacgccacgacuacaacccauaaggugaucuuuuccaaggcaccuggcagcggcagcgcuggcuccgcuagcggcggcgccucuagcggaucaggaggcgcauccauggagaacauugcaucuggccugcugggaccucuacuggugcugcaggccggauucuuccugcugaccaagauccugaccaucccucagagccuggacagcugguggaccagccugaacuuccugggcggcaccccagugugccugggccagaacagccagagccagaucuccucccacagccccaccugcuguccgcccaucugccccggcuaccguuggaugugccugaggagguucaucaucuuccugugcauacuccuguugugucuaauuuuccugcucguucugcucgacuaccagggcaugcugccgguguguccucugauccccggcuccuccaccaccagcaccggccccugcaggaccugcaccacaccagcacaagguaccagcauguuccccagcuguugcuguaccaagcccaccgacggcaacugcaccugcauccccauccccagcagcugggccuucgccaaguaccugugggagugggccagcgugagguucagcuggcugucacuucuugcgccauucgugcagugguucgugggccugagcccuacuguguggcugucgguaaucuggaugaugugguucuggggccccagccuguacaacauccugucaccguucaugccucuccuaccgcuguucuucugccuguggguguacaucugauaauaggcuggagccucgguggccaugcuucuugccccuugggccuccccccagccccuccuccccuuccugcacccguacccccguggucuuugaauaaagucugagugggcggc

SEQ ID NO: 192 - RNA, 2569 nt, Artificial Sequence
  Synthetic Polynucleotide
gggaaauaagagagaaaagaagaguaagaagaaauauaagagccaccauggacagcaagggcagcagccagaagggauccaggcuauuguuacuauuaguggugagcaaccuccucuugccccagggcgugguggacaucgaccccuacaaggaguucggcgccaccguggaguuguuaagcuuccuccccagcgacuucuuccccagcgugagggaccugcuggacaccgccgccgcccuguacagggaggcccuggagagccccgagcacugcucgccucaccacaccgcccugaggcaggccauccugugcuggggcgagcugaugacccuggccaccugggugggcaacaaccuggaggaccccgccagccgcgaccucguugugaacuacgugaacaccaacaugggccugaagaucaggcagcugcugugguuccacaucagcugccugaccuucggcagggagacagugcuggaguaccuggugagcuucggcguguggaucaggacuccacccgccuacaggccucccaacgcgccaauccugagcacccugcccgagacaacaguggugggcagcggcagcgcagguuccgccagcggcggcgcauccaguggcucuggaggagcuucugacauugacccauauaaggaauucggugcuacaguagagcuacugucuuucuugccuagugauuucuucccgaguguaagggaucuccuagauacagccgcugcucuauauagagaggcacuggaaucuccagagcacuguuccccacaccauaccgcucuccggcaggcaauccuguguuggggugaacuuaugacacuggcaaccugggucgguaacaacggaucaggugaggcggcucugcuggucugccaguauacaauccagucgcucauucaucugacaggcgaagauccagguuucuuuaacguggaaaucccagaguucccuuucuauccaaccuguaacguuuguacagcugacgugaacgugacaaucaauuucgacgugggaggaaagaagcaucagcuugaucuggauuucggccaacugacgccacacaccaaagcgguguaccaaccaaggggugcauuuggagggagcgagaaugcuacaaaucuguucuuacuggaacugcuuggugcaggagagcuggcacuaaccaugcgaagcaagaagcuccccaucaacguuaccaccggggaagaacagcaagucagccuugaauccguggauguguacuuucaggauguuuucggcaccauguggugucaccacgcugagaugcagaaucccguguaucucauacccgagacuguacccuacaucaagugggauaauugcaauucaacuaauauuacggcuguggugagggcccagggcuuggacgugacucugcccuuaucucuaccuacuucugcccaagacuccaauuucucugucaagaccgagaugcucgggaaugagaucgauaucgagugcaucauggaggacggugagauaagccagguucugcccggcgacaacaaguucaauaucacuuguucuggcuacgagucccaugugccuucugguggcauacucacaaguacuucucccguagccacgcccauucccggaaccggauaugcguauagucugcgucugaccccacggccuguguccagauuccuggguaacaauaguaucuuauacguguuuuauagcggaaacggcccuaaagcguccggaggggacuauuguauucagaguaauaucguuuucucugaugaaauuccugccagucaggacaugccgacaaacacaacugauauuaccuacgugggcgacaaugccacguauucagugcccauggucacgagcgaggacgccaauucaccaaauguuacuguaacagcuuucugggccuggccaaauaacacugagacugacuucaaauguaaguggacuuugaccucuggaacuccgucggguugcgagaauaucagcggggccuuugcuuccaacaggacuuucgacaucacugucucagggcuggggacagcaccgaagacauuaaucauaacacggaccgccaccaacgccacgacuacaacccauaaggugaucuuuuccaaggcaccuggauccggacugguggucaacuaugugaauacaaauaugggccucaagauuaggcagcuccuaugguuccauauuuccugcuuaacuuucgguagggaaacuguccuggaauaucucguuagcuucggaguguggauucggacuccuccugccuacagaccaccuaacgcuccaauucugucaacucucccagagacgacuguggucagaaggaggggcaggagccccagacggcggacaccaagcccucgccgaagaagaagccaaagcccgcggcgccggagaucucaguccagagagagccagugcugauaauaggcuggagccucgguggccaugcuucuugccccuugggccuccccccagccccuccuccccuuccugcacccguacccccguggucuuugaauaaagucugagugggcggc

SEQ ID NO: 193 - RNA, 2704 nt, Artificial Sequence
  Synthetic Polynucleotide
gggaaauaagagagaaaagaagaguaagaagaaauauaagagccaccauggacagcaagggcagcagccagaaggguagcaggcuacucuugcuccuaguggugagcaacuugcuucuuccccagggcgugguggaggcagcauugcuugucugccaguauacaauccagucgcucauucaucuaacaggcgaggaccccggcuucuuuaacguggaaaucccagaguucccuuucuauccaaccuguaacguuugcacugccgacgugaacgugacaaucaauuucgacgugggaggaaagaagcaucagcuugaucuggauuucggccaacugacgccacacaccaaagcgguguaccaaccaaggggugcauuuggagggagcgagaaugcuacaaaucuguucuuacuggaacugcuuggugcaggagagcuggcacuaaccaugcgaagcaagaagcuccccaucaacguuaccaccggggaagaacagcaagucagccuugaauccguggauguguacuuucaggauguuuucggcaccauguggugucaccacgcugagaugcagaaucccguguaucucauacccgagacuguacccuacaucaagugggauaauugcaauucaacuaauauuacggcuguggugagggcccagggcuuggacgugacucugcccuuaucucuaccuacuucugcccaagacuccaauuucucugucaagaccgagaugcucgggaaugagaucgauaucgagugcaucauggaggacggugagauaagccagguucugcccggcgacaacaaguucaauaucacuuguucuggcuacgagucccaugugccuuccggcggcauacucacaaguacuucucccguagccacgcccauucccggaaccggauacgccuacagucugcgucugaccccacggccuguguccagauuccuggguaacaauaguaucuuauacguguuuuauagcggaaacggcccuaaagcguccggaggggacuauuguauucagaguaauaucguuuucucugaugagauuccagccagucaggacaugccgacaaacacaacugauauuaccuacgugggcgacaaugccacguauucagugcccauggucacgagcgaggacgccaauucaccaaauguuacuguaacagcuuucugggccuggccaaauaacacugagacugacuucaaauguaaguggacuuugaccucuggaacuccgucggguugcgagaauaucagcggggccuuugcuuccaacaggacuuucgacaucacugucucagggcuggggacagcaccgaagacauuaaucauaacacggaccgccaccaacgccacgacuacaacccauaaggugaucuuuuccaaggcaccugaguccaccacuaccuccccgacucuuaacacuacgggcuucgcugaucccaauacuacuacuggguugccuagcucgacacaugugccgacgaaccugacugccccugcaucgaccgggcccacaguuucgaccgccgaugugacaagcccuacgcccgcagguacaaccucaggcgccagcccagugaccccuuccccaagccccugggacaacggaacggaguccaaggcuccugauaugacuuccucuaccagccccgugacuacacccacucccaacgcaacuagcccaaccccagcugugacgacgcccaccccgaacgcgacaucucccacaccugcugugacaaccccuaccccuaacgccacuagcccuacccuagguaagaccaguccgacuagcgccguuacuacaccgaccccuaaugcaaccggcccgacugucggcgagacuuccccgcaagccaaugcgacaaaucacacauugggcgggaccucuccuacaccagucguuacaucucagccuaagaacgcuaccuccgcugucacuaccggccagcacaacaucacaagcucaagcacgaguuccaugagcuugcggccgagcucaaaucccgagacacuaucaccauccacaucagacaacaguacuucacacaugccacucuugacgagcgcucaccccaccggcggcgagaacauuacccaggugacuccggcgucuauuuccacccaccacgucagcacgucgucucccgcaccacggccagggacgacuucucaggccagcggcccaggaaacuccucuacaagcacaaagccaggcgaaguuaacgucaccaagggaacgccuccccagaacgcaaccuccccacaggcucccagcgggcagaagacugcggugccaacugugaccagcaccgguggcaaggccaacucaacaacuggaggcaagcauacgacggggcacggcgcccggaccuccacugaacccacgaccgauuacggaggugauaguaccaccccgcggccacgauauaaugccaccacuuaucugccaccuagcacuuccuccaagcuccggccacgguggaccuucacaagcccacccgugacgacagcccaggcgacggugccagucccaccuacaagccagccacgcuucuccaaccuuaguugauaauaggcuggagccucgguggccaugcuucuugccccuugggccuccccccagccccuccuccccuuccugcacccguacccccguggucuuugaauaaagucugagugggcggc

SEQ ID NO: 194 - RNA, 3223 nt, Artificial Sequence
  Synthetic Polynucleotide
gggaaauaagagagaaaagaagaguaagaagaaauauaagagccaccauggacucgaagggaucuagucagaaaggcucuaggcuccuacuccucuugguggugagcaacuuacuccuuccccagggcguggugagagcagugggcguuuucuuagcaaucugccucgugacaaucuuuguguugccgaccuggggcaacugggccuaccccugcugccacgugacccagcugagagcucaacaccugcuugcccuggagaacaucagcgacaucuaccuuguaagcaaccagacaugcgacggcuucagucuggccagccugaacagccccaagaacggcucaaaccagcuagugaucagccggugcgcuaacggucugaacguugugagcuucuucaucagcaucuugaagagaaguaguagcgcgcugaccggccaccugagagagcugcugaccacucucgagacacucuauggcagcuucagcguggaggaccuguucggcgcaaaccugaaccgcuacgccuggcacagaggcggcggaagcgguagcgcuggcagcgccagcggaggcgcuucauccggauccggcggcgcaagcagccuuucugaggugaagcuccacuuggacaucgaaggccacgccagccauuacaccauaccauggaccgagcugauggcaaaggugcccggccuuagcccagaagcccuguggcgagaggccaacguuaccgaagacuuggcuaguauguuaaacagguacaaacuuaucuacaagacuagcggcacccugggcaucgcauuagccgagcccguggacauccccgccguuagcgagggcagcaugcagguggacgccagcaagguucacccugguguaauuaguggccucaacagcccagccuguauguugagcgccccacuggagaagcagcuguuuuacuauaucgggaccauguugcccaauacccggccacacaguuacguguucuaccagcugcggugucaccugagcuacguggcccugucuaucaacggcgacaaguuccaguacaccggcgccaugaccagcaaguuccugaugggcaccuacaagcgggucaccgagaagggcgacgagcacgugcugucacuuguguucgguaagaccaaggaccugcccgaccuucggggccccuuuucauacccuaguuugaccagcgcccaaaguggcgacuacagccuugugauagugaccaccuucgugcauuacgccaacuuccacaacuacuucgugcccaaccugaaggacauguucagccgggcgguaaccaugacggccgcuucuuaugcccgguaugugcugcagaagcugguccugcuggagaugaagggcgggugccgggagcccgaguuggacaccgaaacccugaccaccauguucgagguuagcguggccuucuucaaggugggucacgcggugggcgaaaccggcaauggaugcguggacuuacgcuggcuggccaagaguuucuuugagcuuaccgugcugaaggauaucaucggcaucugcuacggcgccaccguaaagggaaugcagagcuaugggcuggagagacuugccgccaugcucauggcuaccgugaagauggaggagcugggacaccugacaacagagaagcaggaguacgcccugagacuggccaccgugggcuacccuaaggccggcguguacaguggacucauaggcggagcuaccagcgugcuccuauccgcuuauaacagacaccccuuauuucagccccugcacacagugaugcgggagacuuuauucaucggaucucacgucguacugcgggaguugcggcugaacguaaccacccagggcccuaauuuagcacuuuaucagcugcucaguacugcccugugcagcgcacuugagaucggcgagguacucagaggccuggcccucgguacggagaguggccuguuuucuccaugcuaccuuagccugcgguuugaucugaccagagacaaguugcugagcauggcuccucaagaggcgacccuugaccaggcagccgugucaaacgccguggacggauuccugggcagacugucucuggaacgggaagaccgggaugcuuggcaccuuccugccuauaaguguguggaucggcuggauaagguccugaugauaaucccucugauuaacguuacuuucaucaucucuagcgaucgggagguccgaggguccgcccucuacgaggccagcaccaccuaucugagcagcagccucuucuugucuccugugauuaugaacaagugcagccagggugcaguagccggcgagccccggcagaucccgaagauccagaacuucacucggacccagaagucuuguaucuucugcggcuucgcccuucugaguuacgacgagaaggagggccuggagacuacaacuuacaucacaagccaggaggugcagaacagcauccugucaucuaauuacuuugacuucgacaaccugcacguucauuaucuacugcuaacaacuaacgguaccgucauggaaaucgcaggacuguaugaggagcgggccggcagcgggagcgcgggcucugccagcgguggugccagcagcggcaguggaggugccuccaugcagauuuacgaaggaaagcugaccgccgaaggccugagguucggcaucguggcuuccagauucaaccacgcacugguggacaggcugguggagggcgccaucgacgcaaucgugcgccacggcggcagggaggaggacaucacccucguaagagucccugguagcugggaaauucccguggccgcgggcgagcuggcuaggaaggaggauaucgacgccgucaucgccaucggcguucucauccggggugccacaccacauuucgacuacaucgcaagcgagguuucaaagggacucgccgacuuaagucuggagcugaggaagcccaucaccuuuggcgugaucaccgccgacacccuggagcaggccaucgagcgcgccggcaccaagcacgggaacaagggcugggaggcagccuuaucagccaucgaaauggcgaaucuguucaagagccugcggugauaauaggcuggagccucgguggccaugcuucuugccccuugggccuccccccagccccuccuccccuuccugcacccguacccccguggucuuugaauaaagucugagugggcggc

SEQ ID NO: 195 - RNA, 2950 nt, Artificial Sequence
  Synthetic Polynucleotide
gggaaauaagagagaaaagaagaguaagaagaaauauaagagccaccauggacucuaagggcagcagccagaagggcaguaggcuccuacuucuccucguggugagcaacuuauugcuuccccagggaguggugcagacuccggaacagcccgcuccgcccgcuaccaccguccagccuaccgccacgcgccagcagacuuccuucccguuucgcgucugcgagcucuccucucacggcgaucucuuccgcuucuccuccgauauucagugccccuccuucggcacccgcgagaaccauaccgagggccuccucauggucuuuaaggacaacaucaucccuuacuccuucaagguacgcuccuacacaaagauagucaccaacauccucaucuauaauggaugguacgcugacucuguuaccaaucgccacgaggagaaguucuccguugauuccuacgagacugaccagauggauaccaucuaccagugcuacaaugccgucaagaugaccaaggacggccugacccgcgucuaugucgaccgcgacggcguuaacauaacugucaaccucaagccuacaggcggccuggccaauggcgucagacgcuacgccucccagaccgagcucuacgacgcuccuggcuggcugaucuggaccuaccggacccgcaccacugucaauugccucauuaccgacaugauggccaaguccaauagcccauucgauuucuucguaaccaccaccggccagaccgucgagaugucgccauucuaugacggcaagaauaaggaaacuuuccacgagagagccgauagcuuccacguccgcacgaacuacaagauugucgacuacgacaaucgcggcaccaauccacagggcgagcgccgcgccuuccuggacaagggcaccuacacccucuccuggaaacucgagaacagaaccgccuacuguccccuccagcacuggcagacuuuugauuccaccaucgccacugagacuggcaagaguauccauuucgucaccgacgaaggaacaucuucauucgucacaaauaccacugugggcauugagcuccccgacgccuucaagugcaucgaggaacaggucaacaagacaaugcacgagaaguacgaggccgugcaggaccgguauaccaagggccaggaggccauuacauacuucaucaccagcgguggauugcuucucgccuggcuuccacucacaccucgcagucuggccacaguuaagaaccucacugaguugaccacuccaacaucgucaccaccuucuucaccuagcccuccugcuccuuccgccgcccgcggcuccacuccugccgcugucuuaaggggcucgggcagcgccggcagcgcaucgggaggggcgaguucagggucaggcggugccuccgcaggcaaugcuaccacaccagugccaccaaccgccccuggcaaguccuuagguacccugaacaauccagcgacaguucagauccaguucgcuuacgauucacucaggcgccagaucaaccgcaugcuuggugaccuugcccgggccuggugccucgaacagaagcgccagaacaugguacuuagggaacuuaccaagauuaauccuacuacagucauguccucuaucuacggcaaggccguugcugccaagcgccugggcgacgucaucagcgugucgcagugcgucccagucaaccaggcuaccguuacccucaggaaguccaugagagugccaggcuccgaaacaaugugcuauucccgcccucugguuucauuuuccuucaucaacgacacaaagaccuacgagggccaguuaggaacugacaaugagauauucuugacuaagaagaugacugagguaugccaggcaacuucucaauacuacuuccagucuggaaaugaaauccacguauauaacgacuaucaucacuuuaagacuaucgaacucgacggaauugcuacacuccaaacauucaucucacugaauaccucccuuaucgagaacaucgacuucgcaucccucgagcuguauagcagagacgagcagagagccagcaacguguucgaccuggaggguaucuuucgcgaguacaacuuccaggcacagaauauagccggccuccguaaggaccuggauaacgccguguccaauggccgcaaccaguucgucgacggucuuggcgaacucauggacucucugggauccguggggcaauccaucacaaacuuagucucuacugucgguggacuauucagcagccugguuagcggauuuaucucuuucuuuaagaacccaggcagugguucugccggcucagccagcggcggcgcuaguagcggcagcggaggcgccucaaugcagaucuaugaggguaaguugacagccgaaggcuugagguuuggcaucguagccagccgguucaaccacgcccugguggacaggcugguugagggugccauugacgccauugugaggcacggcggcagggaggaggacauuacccuggucagaguccccggaucaugggagauccccguggccgccggggagcuggccaggaaggaagacaucgacgcugugaucgccaucggcgugcugauccgaggagccacaccccauuucgacuacaucgccagugagguuagcaaaggccuagcggaccugagccuggagcugcgcaagcccaucaccuucggcgucauuacugccgacaccuuggaacaggccaucgaaagggccgguacaaagcacggcaacaagggcugggaggcagcccuuagcgccaucgagauggcaaaccuguuuaaguccuugaggugauaauaggcuggagccucgguggccaugcuucuugccccuugggccuccccccagccccuccuccccuuccugcacccguacccccguggucuuugaauaaagucugagugggcggc

SEQ ID NO: 196 - RNA, 2761 nt, Artificial Sequence; identical to SEQ ID NO: 162
  Synthetic Polynucleotide

SEQ ID NO: 197 - RNA, 2761 nt, Artificial Sequence; identical to SEQ ID NO: 167
  Synthetic Polynucleotide

SEQ ID NO: 198 - RNA, 2761 nt, Artificial Sequence; identical to SEQ ID NO: 172
  Synthetic Polynucleotide

SEQ ID NO: 199 - RNA, 2761 nt, Artificial Sequence; identical to SEQ ID NO: 174
  Synthetic Polynucleotide

SEQ ID NO: 200 - RNA, 2761 nt, Artificial Sequence; identical to SEQ ID NO: 175
  Synthetic Polynucleotide

SEQ ID NO: 201 - RNA, 2294 nt, Artificial Sequence
  Synthetic Polynucleotide
gggaaauaagagagaaaagaagaguaagaagaaauauaagaccccggcgccgccaccaugcaguuguugugcguguucugccucguguuacucugggaggugggcgccgccagccuuagcgaggugaagcuccacuuggacaucgagggccacgccagccacuacaccauccccuggaccgagcucauggccaaggugcccggccuuagccccgaggcccuguggcgggaggccaacgugaccgaggaccuggccagcaugcugaaccgguacaagcugaucuacaagaccagcggcacccugggcaucgcccuggccgagcccguggacauccccgccguuagcgaaggcagcaugcagguggacgccagcaaggugcaccccggcgugaucagcggccugaacagccccgccuguauguugagcgccccacuggagaagcagcuguucuacuacaucggcaccaugcugcccaacacccggccccacagcuacguguucuaccagcugcggugccaccugagcuacguugcccugagcaucaacggcgacaaguuccaguacaccggcgccaugaccagcaaguuccugaugggcaccuacaagcgggucaccgagaagggcgacgagcacgugcugucacugguguucggcaagaccaaggaccugcccgaccugcggggccccuucagcuacccuaguuugaccagcgcccagagcggcgacuacagcuuggugaucgugaccaccuucgugcacuacgccaacuuccacaacuacuucgugcccaaccugaaggacauguucagccgggccgugaccaugacugccgcuucuuacgcccgguacgugcugcagaagcugguccugcuggagaugaagggcggcugccgggagcccgagcuggacaccgaaacacugaccaccauguucgaggugagcguggccuucuucaaggugggucacgcggugggcgaaaccggcaacggcugcguggacuuacgcuggcuggccaagagcuucuucgagcugaccgugcugaaggauaucaucggcaucugcuacggcgccaccgugaagggcaugcagagcuacggccuggagcggcuggccgccaugcuuauggcaacagugaagauggaggagcugggacaccugacaacagagaagcaggaguacgcccugagacuggccacagugggcuacccaaaggccggcguguacaguggacugaucggcggcgcaaccagcgugcugcuauccgcuuacaaccggcacccgcuguuccagccccugcacaccgugaugcgggaaacccuguucaucggaagccacgucgugcugcgggagcugaggcugaacguaaccacccagggcccuaaucuggcccuguaucagcuccucaguaccgcccugugcagcgcccuugagaucggcgaggugcucagaggccuggcccucgguaccgagagcggccucuucagcccaugcuacuuaagccugcgguucgaccugacccgggacaaguugcugagcauggccccgcaggaggccacacuggaccaggcagcuguauccaacgccguggacggcuuccugggcagacugucccuggaacgggaggaccgggacgccuggcaccugccugccuacaaguguguggaucggcuggacaaggugcugaugaucaucccucugauuaaugucaccuucaucaucagcagcgaccgggaggugcggggauccgcccucuacgaggccagcaccaccuaucugagcagcagccuguuccugucuccugugaucaugaacaagugcagccagggcgccguggccggcgagccccggcagauccccaagauccagaacuucacccggacccagaagucuugcaucuucugcggcuucgcccuuuuguccuacgacgagaaggagggcuuggagacuacaaccuacaucaccagccaggaggugcagaacagcauccugucaucuaauuacuucgacuucgacaaccugcacguucauuaccugcuccucaccaccaacgguaccgucauggaaaucgccggacuguacgaggagcgggcccauguugugcuggccaucauccuguacuucaucgcuuucgcacuuggcaucuuccuggugcacaagaucgugauguucuuccugugauaauaggcuggagccucgguggccuagcuucuugccccuugggccuccccccagccccuccuccccuuccugcacccguacccccguggucuuugaauaaagucugagugggcggc

SEQ ID NO: 202 - RNA, 587 nt, Artificial Sequence
  Synthetic Polynucleotide
gggaaauaagagagaaaagaagaguaagaagaaauauaagaccccggcgccgccaccaugagagccgugggcguguuccuggccaucugccuggugaccaucuucgugcugcccaccuggggcaacugggccuaccccugcugccacgugacccagcugagagcccagcaccugcuggcccuggagaacaucagcgacaucuaccuggugagcaaccagaccugcgacggcuucagccuggccagccugaacagccccaagaacggcagcaaccagcuggugaucagcagaugcgccaacggccugaacguggugagcuucuucaucagcauccugaagagaagcagcagcgcccugaccggccaccugagagagcugcugaccacccuggagacccuguacggcagcuucagcguggaggaccuguucggcgccaaccugaacagauacgccuggcacagaggcggcugauaauaggcuggagccucgguggccuagcuucuugccccuugggccuccccccagccccuccuccccuuccugcacccguacccccguggucuuugaauaaagucugagugggcggc

SEQ ID NO: 203 - RNA, 845 nt, Artificial Sequence
  Synthetic Polynucleotide
gggaaauaagagagaaaagaagaguaagaagaaauauaagaccccggcgccgccaccauggugagcuucaagcaggugagagugccccuguucaccgccaucgcccuggugaucgugcugcugcuggccuacuuccugccacccagagugagaggcggcggcagaguggccgccgccgccaucaccugggugcccaagcccaacguggagguguggcccguggacccgccaccucccgugaacuucaacaagaccgccgagcaggaguacggcgacaaggaggugaagcugccccacuggacgccgacccugcacaccuuccaggugccccagaacuacaccaaggccaacugcaccuacugcaacaccagagaguacaccuucagcuacaagggcugcugcuucuacuucaccaagaagaagcacaccuggaacggcugcuuccaggccugcgccgagcuguaccccugcaccuacuucuacggccccaccccagacauccugcccguggugaccagaaaccugaacgccaucgagagccugugggugggcguguacagagugggcgagggcaacuggaccagccuggacggcggcaccuucaagguguaccagaucuucggcagccacugcaccuacgugagcaaguucagcaccgugcccgugagccaccacgagugcagcuuccugaagcccugccugugcgugagccagagaagcaacagcugauaauaggcuggagccucgguggccuagcuucuugccccuugggccuccccccagccccuccuccccuuccugcacccguacccccguggucuuugaauaaagucugagugggcggc

SEQ ID NO: 204 - RNA, 2771 nt, Artificial Sequence
  Synthetic Polynucleotide
gggaaauaagagagaaaagaagaguaagaagaaauauaagaccccggcgccgccaccauggaggcagcacugcuggucugccaguauacaauccagucgcucauucaucugacaggcgaggaccccggcuucuuuaacguggaaaucccagaguucccuuucuauccaaccuguaacguuugcacugcugacgugaacgugacaaucaauuucgacgugggaggaaagaagcaucagcuugaucuggauuucggccaacugacgccacacaccaaagcgguguaccaaccaaggggugcauuuggagggagcgagaaugcuacaaaucuguucuuacuggaacugcuuggugcaggagagcuggcacuaaccaugcgaagcaagaagcuccccaucaacguuaccaccggggaagaacagcaagucagccuugaauccguggauguguacuuucaggauguuuucggcaccauguggugucaccacgcugagaugcagaaucccguguaucucauacccgagacuguacccuacaucaagugggauaauugcaauucaacuaauauuacggcuguggugagggcccagggcuuggacgugacucugcccuuaucucuaccuacuucugcccaagacuccaauuucucugucaagaccgagaugcucgggaaugagaucgauaucgagugcaucauggaggacggugagauaagccagguucugcccggcgacaacaaguucaauaucacuuguucuggcuacgagucccaugugccuagugguggcauacucacaaguacuucucccguagccacgcccauucccggaaccggauacgccuacagucugcgucugaccccacggccuguguccagauuccuggguaacaauaguaucuuauacguguuuuauagcggaaacggcccuaaagcguccggaggggacuauuguauucagaguaauaucguuuucucugaugagauuccugccagucaggacaugccgacaaacacaacugauauuaccuacgugggcgacaaugccacguauucagugcccauggucacgagcgaggacgccaauucaccaaauguuacuguaacagcuuucugggccuggccaaauaacacugagacugacuucaaauguaaguggacuuugaccucuggaacuccgucggguugcgagaauaucagcggggccuuugcuuccaacaggacuuucgacaucacugucucagggcuggggacagcaccgaagacauuaaucauaacacggaccgccaccaacgccacgacuacaacccauaaggugaucuuuuccaaggcaccugaguccaccacuaccuccccgacucuuaacacuacgggcuucgcugaucccaacaccacuacgggguugccuagcucgacacaugugccgacgaaccugacugccccugcaucgaccgggcccacaguuucgaccgccgaugugacaucaccaacgcccgcagguacaaccucaggcgccagcccagugaccccuuccccaagccccugggauaauggaacggaguccaaggcuccugauaugacuuccucuaccagccccgugacuacacccacucccaacgcaacuagcccaaccccagcugugacgacgcccaccccgaacgcgacaucucccacaccugcugugacaaccccaaccccuaacgccacuagcccuacccuagguaagaccaguccgacuagcgccguuacaaccccuaccccuaacgcaaccggcccgaccgugggcgagacuuccccgcaagccaaugcgacaaaucacacauugggcgggaccucuccuacaccagucguuacaucucagccuaagaacgcuaccuccgcugucacuaccggacagcacaacaucaccagcucaagcacgaguuccaugagcuugcggccgagcucaaaucccgagacccuaucaccauccacaucagacaacaguacuucacacaugccacucuugacgagcgcucaccccaccggcggcgagaacaucacccaggugacuccggcgucuauuuccacccaccacgucagcacgucgucucccgcaccgagaccagggacgacuucucaggccagugggccuggcaacuccucuacaagcacaaagccaggcgaaguuaacgugacaaagggaacgccuccccagaacgcaaccaguccucaggcgcccagcgggcagaagacugcggugccaacugugaccagcaccgguggcaaggccaacucaacaacuggaggcaagcauacgacggggcacggcgcccggaccuccacugaacccacgaccgauuacggaggugacagcacaacaccgcggccacgauauaaugccaccacuuaucugccaccauccacaagcuccaagcugcggccacgguggaccuucacaagcccacccgugacgacugcccaagcgacggugccagugccaccuacaagccagccacgcuucuccaaccuuaguaugcucguucuccagugggccagccuugcuguucugacccuccuccugcugcucgugauggccgauugcgccuuuaggagaaaccucagcacuagccacacguacaccacgccgcccuacgaugacgccgagacuuacgucugauaauaggcuggagccucgguggccuagcuucuugccccuugggccuccccccagccccuccuccccuuccugcacccguacccccguggucuuugaauaaagucugagugggcggc

SEQ ID NO: 205 - RNA, 2057 nt, Artificial Sequence
  Synthetic Polynucleotide
gggaaauaagagagaaaagaagaguaagaagaaauauaagaccccggcgccgccaccauggacagcaagggcagcagccagaagggaucgaggcuauuauuguuacuuguggugagcaacuugcuccugccucagggcguggugggcgaggccgccuuguuggugugccaguacaccauccagagccucauccaccucaccggcgaggaccccggcuucuucaacguggagauccccgaguuccccuucuaccccaccugcaacgugugcaccgccgacgugaacgugaccaucaacuucgacgugggcggcaagaagcaccagcuggaccuggacuucggccagcugaccccgcacaccaaggccguguaccagcccaggggcgccuucggcggcagcgagaacgccaccaaccuguuccugcuggagcugcugggcgccggcgagcuggcccugaccaugagguccaagaagcugcccaucaaugugaccacaggagaggagcagcaggugagccuggagagcguggacguguacuuccaggacguguucggcaccauguggugccaccacgccgagaugcagaacccaguuuacuugauuccugagacagugcccuacaucaagugggacaacugcaacagcaccaacaucaccgccguggugagggcccagggccuggacgugacccugccccugagccugcccaccagcgcccaggauagcaacuucagcgugaagaccgaaaugcugggcaacgagaucgacaucgagugcaucauggaggacggcgagaucagccaggugcugcccggcgacaacaaguucaacauuaccugcagcggcuacgagagccacgugcccagcggcggcauccugaccucaacuucacccguggccacuccgauccccggcaccggcuacgccuacagccugcgucugacaccuaggcccgugagcagguuccugggcaauaacagcauccuguacguguucuacagcggcaacggccccaaggcuuccggcggcgacuacuguauucaaucaaacaucguguucagcgacgagauaccagccagccaggacaugccuacuaacaccaccgacaucaccuaugugggagacaaugcuacuuacagcgugcccauggugaccagcgaggacgccaacagcccaaaugucaccgugaccgccuucugggccuggcccaacaacacugagacagacuucaagugcaaguggacccucacauccggcaccccuagcggaugcgagaacaucagcggagcguucgccagcaacaggaccuucgauauaacagugagcggccugggcaccgcuccuaagacccugaucaucaccaggacggccacaaaugcaacuacuacuacacacaaggugaucuucagcaaggcuccggaaucacaagugaggcagcaguucucaaaggauaucgagaagcuucugaacgagcaaguuaacaaggaaaugcagagcaguaaucucuacaugagcaugagcagcuggugcuacacccacucccuggacggagcaggccucuuccuguucgaccacgcagccgaggaguacgagcacgcuaagaaguugaucauuuucuugaacgagaacaacgugcccgugcagcuaacgucaaucagcgcaccugagcacaaguucgagggccugacccagaucuuccagaaggccuacgaacacgaacagcacaucuccgagagcaucaacaauauuguggaucacgcuaucaaguccaaggaccacgcuaccuucaacuuccugcagugguacguggccgagcaacaugaggaggaggugcuguucaaggacauccuggacaagaucgagcugaucgguaaugagaaucacggccuguaccuggccgaccaguacgugaagggcaucgccaagagccggaagucaugauaauaggcuggagccucgguggccuagcuucuugccccuugggccuccccccagccccuccuccccuuccugcacccguacccccguggucuuugaauaaagucugagugggcggc

SEQ ID NO: 206 - RNA, 2060 nt, Artificial Sequence
  Synthetic Polynucleotide
gggaaauaagagagaaaagaagaguaagaagaaauauaagaccccggcgccgccaccauggacagcaagggcagcagccagaagggcucccgguuguugcucuugcucguggugagcaacuuguuguugccucagggcguggugggcgaggccgccuuguuggugugccaguacaccauccagagccucauccaccucaccggcgaggacccuggcuucuucaacguggagaucccugaguucccuuucuacccuaccugcaacgugugcaccgccgacgugaacgugaccaucaacuucgacgugggcggcaagaagcaccagcuggaccuggacuucggccagcugaccccucacaccaaggccguguaccagccuagaggcgccuucggcggcagcgagaacgccaccaaccuguuccugcuggagcugcugggcgccggcgagcuggcccugaccaugagaaguaagaagcugccuaucaacgucacuacuggcgaggagcagcaggugagccuggagagcguggacguguacuuccaggacguguucggcaccauguggugccaccacgccgagaugcagaacccuguguaccugaucccagaaaccgugccuuacaucaagugggacaacugcaacagcaccaacaucaccgcuguggugagagcccagggccuggacgugacccugccucugagccugccuaccagcgcccaagacaguaacuucagcgugaagacggagaugcugggcaacgagaucgacaucgagugcaucauggaggacggcgagaucagccaggugcugccuggcgacaacaaguucaacauaacaugcagcggcuacgagagccacgugccuagcggcggcauccugaccuccaccagcccuguggccaccccuaucccuggcaccggcuacgccuacagccugagacucacgccaagaccugugagcagauucuuaggaaacaacagcauccuguacguguucuacagcggcaacggcccuaaggccuccggcggugacuacuguauccagucuaacaucguguucagcgacgaaaucccagccagccaggacaugccuacaaacaccaccgacaucacuuaugucggcgacaaugcgacauacagcgugccuauggugaccagcgaggacgccaacagcccuaacguaaccgugaccgccuucugggccuggccuaacaacaccgaaaccgacuucaagugcaaguggacuuuaacuaguggcaccccuucuggcugcgagaacaucagcggcgcauucgccagcaacagaaccuucgauaucaccgugagcggccugggcaccgccccuaagacccugaucaucaccagaaccgcaacuaaugcaacuacaacaacccacaaggugaucuucagcaaggccccuggcuccggcucugccggcaguggcagcgcaggcaguggauccgccgguucagguuccgccaugcagaucuacgagggcaagcugaccgccgagggccugagauucggcaucguggccagcagguucaaccacgcccugguggacagacugguggagggcgccaucgacgccaucgugagacacggaggaagagaggaggauauaacacuggucagagugccuggaucaugggaaaucccugucgccgcuggugagcuggcaagaaaggaggacaucgaugcggugaucgccaucggcgugcugauccgcggugcaacuccacacuucgacuacaucgccucugaagugucaaagggccuugcggaccugucccucgaacucagaaagccuaucacauucggagugauuacugcagauacccuggagcaggccaucgagagagccggcaccaagcacggcaacaagggcugggaagccgcgcugucugccauagaaauggcaaaccuuuucaagucccuuagaugauaauaggcuggagccucgguggccuagcuucuugccccuugggccuccccccagccccuccuccccuuccugcacccguacccccguggucuuugaauaaagucugagugggcggc

SEQ ID NO: 207 - RNA, 2761 nt, Artificial Sequence
  Synthetic Polynucleotide
gggaaauaagagagaaaagaagaguaagaagaaauauaagagccaccauggaagccgcccuauuagucugccaguacaccauucaaagccucauccacuugacuggggaggauccuggguucuuuaacguggaaaucccggaauucccuuucuacccaacuugcaacgugugcacggcugacgucaacgugacuaucaacuucgaugugggagggaagaaacaucaacuugaucuggacuuuggccagcuuacuccccacaccaaggccguguaccagccccgcggcgcauucggugggagcgagaacgcgacaaaucuauucuugcuggaacugcugggcgcaggagagcucgcccugacgaugcgaucuaagaagcuucccaucaacguuaccacuggcgaggagcagcaggugucccucgaaagcgucgacgucuauuuccaagacgucuucggaacaauguggugccaccacgcugagaugcagaaccccguauaucuuauucccgaaaccgugccauacaucaagugggacaacugcaacucaacuaacaucacugcaguagugcgcgcccagggacuggacgucacuuugccacugucacugcccacaucagcccaagacagcaacuucagcgucaagacagaaaugcugggcaacgaaaucgacaucgaaugcauaauggaggauggggaaauuucccagguccuccccggugauaacaaguuuaauauuacuuguucuggauaugaaucccaugugccgucuggugguauacugacgaguacaucgccaguggcuaccccaauccccgggacaggcuaugccuacagccugagacugacgccaagaccaguuuccagguuucuggggaauaacucuauccuguauguguuuuauucugguaacggacccaaggcauccggcggugauuauuguauccagagcaauauaguguucucugaugagauuccggccucccaggauaugccaaccaacacgacagauaucaccuaugucggggacaacgccacauauagcgugccaauggugaccagcgaagaugccaauucucccaacgucacagugacagccuuuugggcguggccuaauaacacagaaacugacuuuaaaugcaaauggacucuaaccucaggcaccccaucuggcugcgagaacauaagcggcgcguuugcaucgaacagaacuuuugauauuacaguaucuggguugggcacugcgcccaagacucuaauaauuacacggacggccacuaacgccaccacgacgacucacaaggugaucuucagcaaagcucccgaaucuacuacuaccucgccgacacugaauacgacaggauucgccgacccaaauacuacgaccggccuucccagcucgacacaugugccuacaaacuuaacggcgcccgccaguaccggccccaccgugagcaccgcugacgucaccucuccuaccccugccgggacuacaaguggugcuuccccaguuacucccagcccuagcccuugggacaacggcacugagagcaaagcuccggacaugaccagcaguaccaguccagugacaacuccgacacccaaugcgacguccccaacucccgccgugaccacgccaacaccaaaugccacgucaccuacuccagcggucaccaccccaacgccaaacgcuacuagucccacucuaggcaagacaucucccaccuccgcugucaccaccccuacacccaaugcuaccggucccacggugggugagacuagcccacaggccaacgcaacuaaucauacauuggguggcacaagcccaacgcccgucgucacuagccagccuaagaacgccacaagcgcuguaacuaccggccagcacaauauaacaaguuccaguacuagcaguaugucucugagacccagcucaaauccugaaacccucucgcccucuacgucggauaacuccacgucccacaugccucuacucacaagcgcgcacccuaccggaggagagaauaucacucagguuaccccagcuucuaucucgacucaccaugucucuacuucuuccccagcgccacggcccggcacuaccagccaggcuagcgggccagguaauuccuccacuagcacuaaaccuggcgaagucaacguuaccaagggaacaccuccccagaaugcaaccucgccccaagcucccucuggacagaagacagccgucccuaccgucacaagcaccggugggaaggcgaauucuacgacaggcgggaagcacacuaccggacacggagcaaggacauccacugagcccacgaccgacuacgguggcgacuccaccacgcccagacccagguacaaugcgacuaccuaccugccgccuuccacuuccagcaaacugaggccucguuggacuuucacuucuccaccagucaccaccgcucaggcuaccgugccugucccgccgaccucucagccccgguuuucaaauuugaguaugcucgugcugcagugggccagccuggcagugcuuacccuccugcucuugcugguuauggcugacugcgccuuccgacguaacuuauccaccagucauacuuacacuacaccuccuuaugacgacgcggagaccuacgugugauaauaggcuggagccucgguggccaugcuucuugccccuugggccuccccccagccccuccuccccuuccugcacccguacccccguggucuuugaauaaagucugagugggcggc

SEQ ID NO: 208 - RNA, 2761 nt, Artificial Sequence
  Synthetic Polynucleotide
gggaaauaagagagaaaagaagaguaagaagaaauauaagagccaccauggaagccgccuuacuggucugccaguacacuauucagucccucauccaucucacaggcgaggacccgggguucuucaacgucgaaauccccgaauucccauucuaucccaccuguaacgucugcacagccgacguuaacguuacaaucaauuucgacgugggcgggaagaaacaccagcuggaccucgacuuugggcagcugacgccccacacuaaagccguuuaccagcccaggggugcauucgguggaucugagaaugcuacaaaccucuuucugcuugagcugcuuggugcuggagagcuggcccugacaaugcgcagcaagaaguugccaaucaaugugaccacaggugaagaacagcaggugucccuagaauccguggauguguacuuccaggacguuuucggcacaauguggugccaucacgcagagaugcagaauccgguguaccuuauccccgaaacagugccguacauuaaaugggauaauuguaacuccacaaacaucacggcaguggugcgcgcucaggggcuggacgugacacucccgcuuuccuuaccaacaagugcucaagauuccaacuuuucugugaagaccgagaugcugggcaacgagauugauauugaaugcaucauggaggauggcgagauuagccagguguugcccggcgacaauaaauuuaauauuaccuguuccggcuaugagucacacgugccaaguggaggcauucucacgagcaccucucccguugcaacacccauuccugggacaggguacgcauauagucucaggcugacaccgagaccgguaucgcgcuucuuagguaacaauuccaucuuguauguguuuuacagcggaaacgggccaaaggccucaggaggagacuacugcauccagagcaauauagucuuuagcgacgagaucccugccucacaagacaugcccaccaacaccaccgacaucacguacgucggugauaaugccacuuacagcgugccuauggugaccucugaagacgcaaauucacccaaugucacgguuaccgcauucugggcuuggccaaauaacacugaaaccgacuucaaguguaaauggacccuaaccagcggcaccccaucagggugcgagaauaucagcggggccuucgccagcaaccggacauucgacaucaccgugucaggacuagggacugcuccaaagacauuaauuauuacacggacagcaacuaacgcuacgacuacgacucacaaagugauauuuagcaaagcgcccgaaucgacuacuacgagcccgacccuaaacaccaccgguuucgccgaucccaacacaacuacuggucucccaucuucgacccauguuccaacgaaucugacagcuccagcaaguacggggcccacugugaguacagccgacguuacuagcccaacucccgcggguacgacuaguggcgcgucuccagugaccccuucgccuucuccgugggauaauggaaccgagucaaaggcuccugauaugaccagcuccaccagucccguuacaacgccaacgcccaaugcaacgaguccaacuccggcgguuaccacuccgacaccaaacgccaccucgcccacgccugcaguuacuacgcccaccccuaaugcuacgucacccacucugggaaagaccucaccaaccucugccgugacuacuccuacaccuaaugccacaggacccacaguuggggaaaccagcccacaggcuaacgcaacuaaucauacgcuuggcgggaccucucccacgcccguggucacuucacagccuaagaaugccacaagcgcugugacuacaggccagcauaauauaaccagcaguucaaccaguagcaugucccugcguccuucauccaauccugagacucugagccccagcacuagugacaacucaacuucucacaugccguugcugaccuccgcgcaucccacgggcggugagaauaucacacaggugacacccgcgucuauuagcacacaucacgugaguacguccucgcccgcaccccgcccaggcacaaccucacaagcaucagguccggggaauagcagcacaaguaccaagccuggcgaagugaauguaaccaagggcacgccaccgcagaacgccacauccccucaagccccauccggccagaagaccgcuguacccaccgugacaucaacuggggggaaagcgaacucaacuaccggugggaagcauacaacagggcacggugccagaacuucuacagagccaaccacggacuacggaggggacagcacaacgcccagaccgcgguacaaugcgaccacauaccugccucccucaacuucgaguaagcugcgacccagauggaccuuuacuucuccuccugucaccaccgcucaagccaccgucccgguuccaccuacuucccagccuagauucuccaaucugagcaugcuuguccuacagugggcaucacucgcgguacuaaccuugcugcuacuguuggugauggcggacugcgcguuucgccgcaacuuauccaccucccacacguacacaacaccucccuaugaugacgcugagacuuacgucugauaauaggcuggagccucgguggccaugcuucuugccccuugggccuccccccagccccuccuccccuuccugcacccguacccccguggucuuugaauaaagucugagugggcggc

SEQ ID NO: 209 - RNA, 2737 nt, Artificial Sequence
  Synthetic Polynucleotide
gggaaauaagagagaaaagaagaguaagaagaaauauaagagccaccaugacccggcggcggguguuaagcgugguggugcucuuagccgccuuagccugccggcuuggcgcccagacuccggagcagcccgcuccucccgccaccaccguccagcccaccgccacccgccagcagaccuccuuccccuuccgcgucugcgagcucuccucccacggcgaccucuuccgcuucuccuccgacauccagugccccuccuucggcacccgcgagaaccacaccgagggccuccucauggucuucaaggacaacaucauccccuacuccuucaagguccgcuccuacaccaagaucgucaccaacauccucaucuacaacggcugguacgccgacucugugacuaaucgccacgaggagaaguucuccgucgacuccuacgagacugaccagauggacaccaucuaccagugcuacaacgccgucaagaugaccaaggacggccucacccgcgucuacgucgaccgcgacggcgucaacaucaccgucaaccucaagccuacaggcggccucgccaacggcguccgccgcuacgccucccagaccgagcucuacgacgccccuggcuggcucaucuggaccuaccgcaccaggaccacugucaauugccucaucaccgacaugauggccaaguccaacuccccuuucgacuucuucgugaccaccacaggccagaccgucgagaugucgccauucuaugacggcaagaacaaggagacuuuccacgagagagcggacucuuuccauguccgcaccaacuacaagauugucgacuacgacaaccgcggcaccaauccacagggcgagcgccgcgccuuccucgacaagggcaccuacacccucuccuggaagcucgagaaccgcaccgccuacuguccucuccagcacuggcagaccuucgauuccaccaucgccaccgagacuggcaaguccauccauuucgucaccgacgaaggaacaucuucauucgucacaaauacaaccgugggcaucgagcuccccgacgccuucaagugcaucgaggagcaggucaacaagaccaugcacgagaaguacgaggccguccaggaccgguauacaaagggccaggaggccaucaccuacuucaucaccagcggaggucugcuucucgccuggcuuccacucacaccucgcucccuggccacagugaagaaccucacugaguugaccaccccaacaaguuccccaccuaguaguccuagcccuccugcuccuuccgccgcccgcggcuccacgccugccgccguccugcggagacggagaagggacgccggcaacgcuaccacuccugugccgccgacagccccuggaaagucccuagguacccucaacaacccagcgacaguucagauccaguucgccuacgacucucucaggcgccagaucaaccgcaugcuuggugaccuugcccgcgccuggugccucgagcagaagcgccagaacauggugcuucgugaacuaacaaagauuaauccuacuacagugauguccuccaucuacggcaaggccgucgccgccaagcgccucggcgacgucaucuccgucucccagugcgucccagugaaccaggcuaccgugacccucaggaaguccaugagagugccaggcuccgagacaaugugcuacucccgcccacucgucuccuucuccuucaucaacgacacaaagaccuacgagggccaguuaggcacugacaacgagaucuucuugacuaagaagaugacugagguaugccaggcaacuucucaauacuacuuccagucuggaaaugagauccacguauauaacgacuaccaccacuucaagacuauugaacucgacggaauugccacccuccaaacauucaucucacugaauaccucccucaucgagaacaucgacuucgccucccucgagcuguauagcagagacgagcagcgcgccuccaacgucuucgaccucgagggcaucuuccgcgaguacaacuuccaggcacagaacauagccggccuccguaaggaucuggacaaugccguguccaacggccgcaaccaguucgucgacgguuugggugaacucauggacucucugggcuccgucggccaguccauaacuaacuuagucucuacggugggaggccuauucagcagccuggugagcggcuucaucucuuucuucaagaaccccuucggcggcaugcucauccucguccucgucgccggcgucgucauacuggugaucucacucacaaggaggacgcgccaaaugucccagcagccagugcagaugcucuacccaggcauagacgagcucgcucagcagcacgcgucgggugagggaccaggcaucaauccuaucuccaagacugagcugcaagccauuaugcucgcccuccacgagcagaaccaggaacagaagcgggccgcccagcgagcugccggccccuccgucgccaguagggcacuacaagccgcccgggaccgcuucccaggccugagaaggaggagauaccacgacccagagacagccgcugcccuccuuggcgaagcagaaaccgaguucugauaauaggcuggagccucgguggccaugcuucuugccccuugggccuccccccagccccuccuccccuuccugcacccguacccccguggucuuugaauaaagucugagugggcggc

SEQ ID NO: 210 - RNA, 2761 nt, Artificial Sequence
  Synthetic Polynucleotide
gggaaauaagagagaaaagaagaguaagaagaaauauaagagccaccauggaggcagcacugcuggucugccaguauacaauccagucgcucauucaucugacaggcgaggaccccggcuucuuuaacguggaaaucccagaguucccuuucuauccaaccuguaacguuugcacugcugacgugaacgugacaaucaauuucgacgugggaggaaagaagcaucagcuugaucuggauuucggccaacugacgccacacaccaaagcgguguaccaaccaaggggugcauuuggagggagcgagaaugcugcgaaucuguucuuacuggaacugcuuggugcaggagagcuggcacuaaccaugcgaagcaagaagcuccccaucaacguuaccaccggggaagaacagcaagucagccuugaauccguggauguguacuuucaggauguuuucggcaccauguggugucaccacgcugagaugcagaaucccguguaucucauacccgagacuguacccuacaucaagugggauaauugcaauucagcgaauauuacggcuguggugagggcccagggcuuggacgugacucugcccuuaucucuaccuacuucugcccaagacuccaauuucgcggucaagaccgagaugcucgggaaugagaucgauaucgagugcaucauggaggacggugagauaagccagguucugcccggcgacaacaaguucaauaucgcguguucuggcuacgagucccaugugccuagugguggcauacucacaaguacuucucccguagccacgcccauucccggaaccggauacgccuacagucugcgucugaccccacggccuguguccagauuccuggguaacaauaguaucuuauacguguuuuauagcggaaacggcccuaaagcguccggaggggacuauuguauucagaguaauaucguuuucucugaugagauuccugccagucaggacaugccgacaaacacaacugauauuaccuacgugggcgacaaugccacguauucagugcccauggucacgagcgaggacgccaauucaccaaauguugcgguaacagcuuucugggccuggccaaauaacacugagacugacuucaaauguaaguggacuuugaccucuggaacuccgucggguugcgagaauaucagcggggccuuugcuuccaacaggacuuucgacaucacugucucagggcuggggacagcaccgaagacauuaaucauaacacggaccgccaccaacgccgcgacuacaacccauaaggugaucuuuuccaaggcaccugaguccaccacuaccuccccgacucuuaacacuacgggcuucgcugaucccaacaccacuacgggguugccuagcucgacacaugugccgacgaaccugacugccccugcaucgaccgggcccacaguuucgaccgccgaugugacaucaccaacgcccgcagguacaaccucaggcgccagcccagugaccccuuccccaagccccugggauaauggaacggaguccaaggcuccugauaugacuuccucuaccagccccgugacuacacccacucccaacgcaacuagcccaaccccagcugugacgacgcccaccccgaacgcgacaucucccacaccugcugugacaaccccaaccccuaacgccacuagcccuacccuagguaagaccaguccgacuagcgccguuacaaccccuaccccuaacgcaaccggcccgaccgugggcgagacuuccccgcaagccaaugcgacaaaucacacauugggcgggaccucuccuacaccagucguuacaucucagccuaagaacgcuaccuccgcugucacuaccggacagcacaacaucaccagcucaagcacgaguuccaugagcuugcggccgagcucaaaucccgagacccuaucaccauccacaucagacaacaguacuucacacaugccacucuugacgagcgcucaccccaccggcggcgagaacaucacccaggugacuccggcgucuauuuccacccaccacgucagcacgucgucucccgcaccgagaccagggacgacuucucaggccagugggccuggcaacuccucuacaagcacaaagccaggcgaaguuaacgugacaaagggaacgccuccccagaacgcaaccaguccucaggcgcccagcgggcagaagacugcggugccaacugugaccagcaccgguggcaaggccaacucaacaacuggaggcaagcauacgacggggcacggcgcccggaccuccacugaacccacgaccgauuacggaggugacagcacaacaccgcggccacgauauaaugccaccacuuaucugccaccauccacaagcuccaagcugcggccacgguggaccuucacaagcccacccgugacgacugcccaagcgacggugccagugccaccuacaagccagccacgcuucuccaaccuuaguaugcucguucuccagugggccagccuugcuguucugacccuccuccugcugcucgugauggccgauugcgccuuuaggagaaaccucagcacuagccacacguacaccacgccgcccuacgaugacgccgagacuuacgucugauaauaggcuggagccucgguggccaugcuucuugccccuugggccuccccccagccccuccuccccuuccugcacccguacccccguggucuuugaauaaagucugagugggcggc

SEQ ID NO: 211 - RNA, 2595 nt, Artificial Sequence
  Synthetic Polynucleotide
auggaggcagcacugcuggucugccaguauacaauccagucgcucauucaucugacaggcgaggaccccggcuucuuuaacguggaaaucccagaguucccuuucuauccaaccuguaacguuugcacugcugacgugaacgugacaaucaauuucgacgugggaggaaagaagcaucagcuugaucuggauuucggccaacugacgccacacaccaaagcgguguaccaaccaaggggugcauuuggagggagcgagaaugcugcgaaucuguucuuacuggaacugcuuggugcaggagagcuggcacuaaccaugcgaagcaagaagcuccccaucaacguuaccaccggggaagaacagcaagucagccuugaauccguggauguguacuuucaggauguuuucggcaccauguggugucaccacgcugagaugcagaaucccguguaucucauacccgagacuguacccuacaucaagugggauaauugcaauucagcgaauauuacggcuguggugagggcccagggcuuggacgugacucugcccuuaucucuaccuacuucugcccaagacuccaauuucgcggucaagaccgagaugcucgggaaugagaucgauaucgagugcaucauggaggacggugagauaagccagguucugcccggcgacaacaaguucaauaucgcguguucuggcuacgagucccaugugccuagugguggcauacucacaaguacuucucccguagccacgcccauucccggaaccggauacgccuacagucugcgucugaccccacggccuguguccagauuccuggguaacaauaguaucuuauacguguuuuauagcggaaacggcccuaaagcguccggaggggacuauuguauucagaguaauaucguuuucucugaugagauuccugccagucaggacaugccgacaaacacaacugauauuaccuacgugggcgacaaugccacguauucagugcccauggucacgagcgaggacgccaauucaccaaauguugcgguaacagcuuucugggccuggccaaauaacacugagacugacuucaaauguaaguggacuuugaccucuggaacuccgucggguugcgagaauaucagcggggccuuugcuuccaacaggacuuucgacaucacugucucagggcuggggacagcaccgaagacauuaaucauaacacggaccgccaccaacgccgcgacuacaacccauaaggugaucuuuuccaaggcaccugaguccaccacuaccuccccgacucuuaacacuacgggcuucgcugaucccaacaccacuacgggguugccuagcucgacacaugugccgacgaaccugacugccccugcaucgaccgggcccacaguuucgaccgccgaugugacaucaccaacgcccgcagguacaaccucaggcgccagcccagugaccccuuccccaagccccugggauaauggaacggaguccaaggcuccugauaugacuuccucuaccagccccgugacuacacccacucccaacgcaacuagcccaaccccagcugugacgacgcccaccccgaacgcgacaucucccacaccugcugugacaaccccaaccccuaacgccacuagcccuacccuagguaagaccaguccgacuagcgccguuacaaccccuaccccuaacgcaaccggcccgaccgugggcgagacuuccccgcaagccaaugcgacaaaucacacauugggcgggaccucuccuacaccagucguuacaucucagccuaagaacgcuaccuccgcugucacuaccggacagcacaacaucaccagcucaagcacgaguuccaugagcuugcggccgagcucaaaucccgagacccuaucaccauccacaucagacaacaguacuucacacaugccacucuugacgagcgcucaccccaccggcggcgagaacaucacccaggugacuccggcgucuauuuccacccaccacgucagcacgucgucucccgcaccgagaccagggacgacuucucaggccagugggccuggcaacuccucuacaagcacaaagccaggcgaaguuaacgugacaaagggaacgccuccccagaacgcaaccaguccucaggcgcccagcgggcagaagacugcggugccaacugugaccagcaccgguggcaaggccaacucaacaacuggaggcaagcauacgacggggcacggcgcccggaccuccacugaacccacgaccgauuacggaggugacagcacaacaccgcggccacgauauaaugccaccacuuaucugccaccauccacaagcuccaagcugcggccacgguggaccuucacaagcccacccgugacgacugcccaagcgacggugccagugccaccuacaagccagccacgcuucuccaaccuuaguaugcucguucuccagugggccagccuugcuguucugacccuccuccugcugcucgugauggccgauugcgccuuuaggagaaaccucagcacuagccacacguacaccacgccgcccuacgaugacgccgagacuuacguc

SEQ ID NO: 212 - RNA, 3389 nt, Artificial Sequence
  Synthetic Polynucleotide
gggaaauaagagagaaaagaagaguaagaagaaauauaagaccccggcgccgccaccauggugagcuucaagcaggugagagugccccuguucaccgccaucgcccuggugaucgugcugcugcuggccuacuuccugccacccagagugagaggcggcggcagaguggccgccgccgccaucaccugggugcccaagcccaacguggagguguggcccguggacccgccaccucccgugaacuucaacaagaccgccgagcaggaguacggcgacaaggaggugaagcugccccacuggacgccgacccugcacaccuuccaggugccccagaacuacaccaaggccaacugcaccuacugcaacaccagagaguacaccuucagcuacaagggcugcugcuucuacuucaccaagaagaagcacaccuggaacggcugcuuccaggccugcgccgagcuguaccccugcaccuacuucuacggccccaccccagacauccugcccguggugaccagaaaccugaacgccaucgagagccugugggugggcguguacagagugggcgagggcaacuggaccagccuggacggcggcaccuucaagguguaccagaucuucggcagccacugcaccuacgugagcaaguucagcaccgugcccgugagccaccacgagugcagcuuccugaagcccugccugugcgugagccagagaagcaacagcggcacuagcggcucuagcggaucaggcagcggagggaguggaggcucaggagggaccagcggcagcaguggcuccggaagcggaggcagccccugcugccacgugacccagcugagagcccagcaccugcuggcccuggagaacaucagcgacaucuaccuggugagcaaccagaccugcgacggcuucagccuggccagccugaacagccccaagaacggcagcaaccagcuggugaucagcagaugcgccaacggccugaacguggugagcuucuucaucagcauccugaagagaagcagcagcgcccugaccggccaccugagagagcugcugaccacccuggagacccuguacggcagcuucagcguggaggaccuguucggcgccaaccugaacagauacgccuggcacagaggcggcggaggagguggcuccgguggagguggcagcggaggaggaggcagugguggcggaggcagccuuagcgaggugaagcuccacuuggacaucgagggccacgccagccacuacaccauccccuggaccgagcucauggccaaggugcccggccuuagccccgaggcccuguggcgggaggccaacgugaccgaggaccuggccagcaugcugaaccgguacaagcugaucuacaagaccagcggcacccugggcaucgcccuggccgagcccguggacauccccgccguuagcgaaggcagcaugcagguggacgccagcaaggugcaccccggcgugaucagcggccugaacagccccgccuguauguugagcgccccacuggagaagcagcuguucuacuacaucggcaccaugcugcccaacacccggccccacagcuacguguucuaccagcugcggugccaccugagcuacguugcccugagcaucaacggcgacaaguuccaguacaccggcgccaugaccagcaaguuccugaugggcaccuacaagcgggucaccgagaagggcgacgagcacgugcugucacugguguucggcaagaccaaggaccugcccgaccugcggggccccuucagcuacccuaguuugaccagcgcccagagcggcgacuacagcuuggugaucgugaccaccuucgugcacuacgccaacuuccacaacuacuucgugcccaaccugaaggacauguucagccgggccgugaccaugacugccgcuucuuacgcccgguacgugcugcagaagcugguccugcuggagaugaagggcggcugccgggagcccgagcuggacaccgaaacacugaccaccauguucgaggugagcguggccuucuucaaggugggucacgcggugggcgaaaccggcaacggcugcguggacuuacgcuggcuggccaagagcuucuucgagcugaccgugcugaaggauaucaucggcaucugcuacggcgccaccgugaagggcaugcagagcuacggccuggagcggcuggccgccaugcuuauggcaacagugaagauggaggagcugggacaccugacaacagagaagcaggaguacgcccugagacuggccacagugggcuacccaaaggccggcguguacaguggacugaucggcggcgcaaccagcgugcugcuauccgcuuacaaccggcacccgcuguuccagccccugcacaccgugaugcgggaaacccuguucaucggaagccacgucgugcugcgggagcugaggcugaacguaaccacccagggcccuaaucuggcccuguaucagcuccucaguaccgcccugugcagcgcccuugagaucggcgaggugcucagaggccuggcccucgguaccgagagcggccucuucagcccaugcuacuuaagccugcgguucgaccugacccgggacaaguugcugagcauggccccgcaggaggccacacuggaccaggcagcuguauccaacgccguggacggcuuccugggcagacugucccuggaacgggaggaccgggacgccuggcaccugccugccuacaaguguguggaucggcuggacaaggugcugaugaucaucccucugauuaaugucaccuucaucaucagcagcgaccgggaggugcggggauccgcccucuacgaggccagcaccaccuaucugagcagcagccuguuccugucuccugugaucaugaacaagugcagccagggcgccguggccggcgagccccggcagauccccaagauccagaacuucacccggacccagaagucuugcaucuucugcggcuucgcccuuuuguccuacgacgagaaggagggcuuggagacuacaaccuacaucaccagccaggaggugcagaacagcauccugucaucuaauuacuucgacuucgacaaccugcacguucauuaccugcuccucaccaccaacgguaccgucauggaaaucgccggacuguacgaggagcgggcccauguugugcuggccaucauccuguacuucaucgcuuucgcacuuggcaucuuccuggugcacaagaucgugauguucuuccugugauaauaggcuggagccucgguggccuagcuucuugccccuugggccuccccccagccccuccuccccuuccugcacccguacccccguggucuuugaauaaagucugagugggcggc

SEQ ID NO: 213 - RNA, 3213 nt, Artificial Sequence
  Synthetic Polynucleotide
auggugagcuucaagcaggugagagugccccuguucaccgccaucgcccuggugaucgugcugcugcuggccuacuuccugccacccagagugagaggcggcggcagaguggccgccgccgccaucaccugggugcccaagcccaacguggagguguggcccguggacccgccaccucccgugaacuucaacaagaccgccgagcaggaguacggcgacaaggaggugaagcugccccacuggacgccgacccugcacaccuuccaggugccccagaacuacaccaaggccaacugcaccuacugcaacaccagagaguacaccuucagcuacaagggcugcugcuucuacuucaccaagaagaagcacaccuggaacggcugcuuccaggccugcgccgagcuguaccccugcaccuacuucuacggccccaccccagacauccugcccguggugaccagaaaccugaacgccaucgagagccugugggugggcguguacagagugggcgagggcaacuggaccagccuggacggcggcaccuucaagguguaccagaucuucggcagccacugcaccuacgugagcaaguucagcaccgugcccgugagccaccacgagugcagcuuccugaagcccugccugugcgugagccagagaagcaacagcggcacuagcggcucuagcggaucaggcagcggagggaguggaggcucaggagggaccagcggcagcaguggcuccggaagcggaggcagccccugcugccacgugacccagcugagagcccagcaccugcuggcccuggagaacaucagcgacaucuaccuggugagcaaccagaccugcgacggcuucagccuggccagccugaacagccccaagaacggcagcaaccagcuggugaucagcagaugcgccaacggccugaacguggugagcuucuucaucagcauccugaagagaagcagcagcgcccugaccggccaccugagagagcugcugaccacccuggagacccuguacggcagcuucagcguggaggaccuguucggcgccaaccugaacagauacgccuggcacagaggcggcggaggagguggcuccgguggagguggcagcggaggaggaggcagugguggcggaggcagccuuagcgaggugaagcuccacuuggacaucgagggccacgccagccacuacaccauccccuggaccgagcucauggccaaggugcccggccuuagccccgaggcccuguggcgggaggccaacgugaccgaggaccuggccagcaugcugaaccgguacaagcugaucuacaagaccagcggcacccugggcaucgcccuggccgagcccguggacauccccgccguuagcgaaggcagcaugcagguggacgccagcaaggugcaccccggcgugaucagcggccugaacagccccgccuguauguugagcgccccacuggagaagcagcuguucuacuacaucggcaccaugcugcccaacacccggccccacagcuacguguucuaccagcugcggugccaccugagcuacguugcccugagcaucaacggcgacaaguuccaguacaccggcgccaugaccagcaaguuccugaugggcaccuacaagcgggucaccgagaagggcgacgagcacgugcugucacugguguucggcaagaccaaggaccugcccgaccugcggggccccuucagcuacccuaguuugaccagcgcccagagcggcgacuacagcuuggugaucgugaccaccuucgugcacuacgccaacuuccacaacuacuucgugcccaaccugaaggacauguucagccgggccgugaccaugacugccgcuucuuacgcccgguacgugcugcagaagcugguccugcuggagaugaagggcggcugccgggagcccgagcuggacaccgaaacacugaccaccauguucgaggugagcguggccuucuucaaggugggucacgcggugggcgaaaccggcaacggcugcguggacuuacgcuggcuggccaagagcuucuucgagcugaccgugcugaaggauaucaucggcaucugcuacggcgccaccgugaagggcaugcagagcuacggccuggagcggcuggccgccaugcuuauggcaacagugaagauggaggagcugggacaccugacaacagagaagcaggaguacgcccugagacuggccacagugggcuacccaaaggccggcguguacaguggacugaucggcggcgcaaccagcgugcugcuauccgcuuacaaccggcacccgcuguuccagccccugcacaccgugaugcgggaaacccuguucaucggaagccacgucgugcugcgggagcugaggcugaacguaaccacccagggcccuaaucuggcccuguaucagcuccucaguaccgcccugugcagcgcccuugagaucggcgaggugcucagaggccuggcccucgguaccgagagcggccucuucagcccaugcuacuuaagccugcgguucgaccugacccgggacaaguugcugagcauggccccgcaggaggccacacuggaccaggcagcuguauccaacgccguggacggcuuccugggcagacugucccuggaacgggaggaccgggacgccuggcaccugccugccuacaaguguguggaucggcuggacaaggugcugaugaucaucccucugauuaaugucaccuucaucaucagcagcgaccgggaggugcggggauccgcccucuacgaggccagcaccaccuaucugagcagcagccuguuccugucuccugugaucaugaacaagugcagccagggcgccguggccggcgagccccggcagauccccaagauccagaacuucacccggacccagaagucuugcaucuucugcggcuucgcccuuuuguccuacgacgagaaggagggcuuggagacuacaaccuacaucaccagccaggaggugcagaacagcauccugucaucuaauuacuucgacuucgacaaccugcacguucauuaccugcuccucaccaccaacgguaccgucauggaaaucgccggacuguacgaggagcgggcccauguugugcuggccaucauccuguacuucaucgcuuucgcacuuggcaucuuccuggugcacaagaucgugauguucuuccug

SEQ ID NO: 214 - protein, 1071 aa, Artificial Sequence
  Synthetic Polypeptide
MVSFKQVRVPLFTAIALVIVLLLAYFLPPRVRGGGRVAAAAITWVPKPNVEVWPVDPPPPVNFNKTAEQEYGDKEVKLPHWTPTLHTFQVPQNYTKANCTYCNTREYTFSYKGCCFYFTKKKHTWNGCFQACAELYPCTYFYGPTPDILPVVTRNLNAIESLWVGVYRVGEGNWTSLDGGTFKVYQIFGSHCTYVSKFSTVPVSHHECSFLKPCLCVSQRSNSGTSGSSGSGSGGSGGSGGTSGSSGSGSGGSPCCHVTQLRAQHLLALENISDIYLVSNQTCDGFSLASLNSPKNGSNQLVISRCANGLNVVSFFISILKRSSSALTGHLRELLTTLETLYGSFSVEDLFGANLNRYAWHRGGGGGGSGGGGSGGGGSGGGGSLSEVKLHLDIEGHASHYTIPWTELMAKVPGLSPEALWREANVTEDLASMLNRYKLIYKTSGTLGIALAEPVDIPAVSEGSMQVDASKVHPGVISGLNSPACMLSAPLEKQLFYYIGTMLPNTRPHSYVFYQLRCHLSYVALSINGDKFQYTGAMTSKFLMGTYKRVTEKGDEHVLSLVFGKTKDLPDLRGPFSYPSLTSAQSGDYSLVIVTTFVHYANFHNYFVPNLKDMFSRAVTMTAASYARYVLQKLVLLEMKGGCREPELDTETLTTMFEVSVAFFKVGHAVGETGNGCVDLRWLAKSFFELTVLKDIIGICYGATVKGMQSYGLERLAAMLMATVKMEELGHLTTEKQEYALRLATVGYPKAGVYSGLIGGATSVLLSAYNRHPLFQPLHTVMRETLFIGSHVVLRELRLNVTTQGPNLALYQLLSTALCSALEIGEVLRGLALGTESGLFSPCYLSLRFDLTRDKLLSMAPQEATLDQAAVSNAVDGFLGRLSLEREDRDAWHLPAYKCVDRLDKVLMIIPLINVTFIISSDREVRGSALYEASTTYLSSSLFLSPVIMNKCSQGAVAGEPRQIPKIQNFTRTQKSCIFCGFALLSYDEKEGLETTTYITSQEVQNSILSSNYFDFDNLHVHYLLLTTNGTVMEIAGLYEERAHVVLAIILYFIAFALGIFLVHKIVMFFL

SEQ ID NO: 215 - RNA, 3389 nt, Artificial Sequence
  Synthetic Polynucleotide
gggaaauaagagagaaaagaagaguaagaagaaauauaagaccccggcgccgccaccauggugagcuucaagcaggugagagugccccuguucaccgccaucgcccuggugaucgugcugcugcuggccuacuuccugccacccagagugagaggcggcggcagaguggccgccgccgccaucaccugggugcccaagcccaacguggagguguggcccguggacccgccaccucccgugaacuucaacaagaccgccgagcaggaguacggcgacaaggaggugaagcugccccacuggacgccgacccugcacaccuuccaggugccccagaacuacaccaaggccaacugcaccuacugcaacaccagagaguacaccuucagcuacaagggcugcugcuucuacuucaccaagaagaagcacaccuggaacggcugcuuccaggccugcgccgagcuguaccccugcaccuacuucuacggccccaccccagacauccugcccguggugaccagaaaccugaacgccaucgagagccugugggugggcguguacagagugggcgagggcaacuggaccagccuggacggcggcaccuucaagguguaccagaucuucggcagccacugcaccuacgugagcaaguucagcaccgugcccgugagccaccacgagugcagcuuccugaagcccugccugugcgugagccagagaagcaacagcggaggaggaggaucuggaggcggcggaagugguggaggaggaagcggaggagguggcagcggaggugguggaaguggcggcggaggaagccccugcugccacgugacccagcugagagcccagcaccugcuggcccuggagaacaucagcgacaucuaccuggugagcaaccagaccugcgacggcuucagccuggccagccugaacagccccaagaacggcagcaaccagcuggugaucagcagaugcgccaacggccugaacguggugagcuucuucaucagcauccugaagagaagcagcagcgcccugaccggccaccugagagagcugcugaccacccuggagacccuguacggcagcuucagcguggaggaccuguucggcgccaaccugaacagauacgccuggcacagaggcggcggaggagguggcuccgguggagguggcagcggaggaggaggcagugguggcggaggcagccuuagcgaggugaagcuccacuuggacaucgagggccacgccagccacuacaccauccccuggaccgagcucauggccaaggugcccggccuuagccccgaggcccuguggcgggaggccaacgugaccgaggaccuggccagcaugcugaaccgguacaagcugaucuacaagaccagcggcacccugggcaucgcccuggccgagcccguggacauccccgccguuagcgaaggcagcaugcagguggacgccagcaaggugcaccccggcgugaucagcggccugaacagccccgccuguauguugagcgccccacuggagaagcagcuguucuacuacaucggcaccaugcugcccaacacccggccccacagcuacguguucuaccagcugcggugccaccugagcuacguugcccugagcaucaacggcgacaaguuccaguacaccggcgccaugaccagcaaguuccugaugggcaccuacaagcgggucaccgagaagggcgacgagcacgugcugucacugguguucggcaagaccaaggaccugcccgaccugcggggccccuucagcuacccuaguuugaccagcgcccagagcggcgacuacagcuuggugaucgugaccaccuucgugcacuacgccaacuuccacaacuacuucgugcccaaccugaaggacauguucagccgggccgugaccaugacugccgcuucuuacgcccgguacgugcugcagaagcugguccugcuggagaugaagggcggcugccgggagcccgagcuggacaccgaaacacugaccaccauguucgaggugagcguggccuucuucaaggugggucacgcggugggcgaaaccggcaacggcugcguggacuuacgcuggcuggccaagagcuucuucgagcugaccgugcugaaggauaucaucggcaucugcuacggcgccaccgugaagggcaugcagagcuacggccuggagcggcuggccgccaugcuuauggcaacagugaagauggaggagcugggacaccugacaacagagaagcaggaguacgcccugagacuggccacagugggcuacccaaaggccggcguguacaguggacugaucggcggcgcaaccagcgugcugcuauccgcuuacaaccggcacccgcuguuccagccccugcacaccgugaugcgggaaacccuguucaucggaagccacgucgugcugcgggagcugaggcugaacguaaccacccagggcccuaaucuggcccuguaucagcuccucaguaccgcccugugcagcgcccuugagaucggcgaggugcucagaggccuggcccucgguaccgagagcggccucuucagcccaugcuacuuaagccugcgguucgaccugacccgggacaaguugcugagcauggccccgcaggaggccacacuggaccaggcagcuguauccaacgccguggacggcuuccugggcagacugucccuggaacgggaggaccgggacgccuggcaccugccugccuacaaguguguggaucggcuggacaaggugcugaugaucaucccucugauuaaugucaccuucaucaucagcagcgaccgggaggugcggggauccgcccucuacgaggccagcaccaccuaucugagcagcagccuguuccugucuccugugaucaugaacaagugcagccagggcgccguggccggcgagccccggcagauccccaagauccagaacuucacccggacccagaagucuugcaucuucugcggcuucgcccuuuuguccuacgacgagaaggagggcuuggagacuacaaccuacaucaccagccaggaggugcagaacagcauccugucaucuaauuacuucgacuucgacaaccugcacguucauuaccugcuccucaccaccaacgguaccgucauggaaaucgccggacuguacgaggagcgggcccauguugugcuggccaucauccuguacuucaucgcuuucgcacuuggcaucuuccuggugcacaagaucgugauguucuuccugugauaauaggcuggagccucgguggccuagcuucuugccccuugggccuccccccagccccuccuccccuuccugcacccguacccccguggucuuugaauaaagucugagugggcggc

SEQ ID NO: 216 - RNA, 3213 nt, Artificial Sequence
  Synthetic Polynucleotide
auggugagcuucaagcaggugagagugccccuguucaccgccaucgcccuggugaucgugcugcugcuggccuacuuccugccacccagagugagaggcggcggcagaguggccgccgccgccaucaccugggugcccaagcccaacguggagguguggcccguggacccgccaccucccgugaacuucaacaagaccgccgagcaggaguacggcgacaaggaggugaagcugccccacuggacgccgacccugcacaccuuccaggugccccagaacuacaccaaggccaacugcaccuacugcaacaccagagaguacaccuucagcuacaagggcugcugcuucuacuucaccaagaagaagcacaccuggaacggcugcuuccaggccugcgccgagcuguaccccugcaccuacuucuacggccccaccccagacauccugcccguggugaccagaaaccugaacgccaucgagagccugugggugggcguguacagagugggcgagggcaacuggaccagccuggacggcggcaccuucaagguguaccagaucuucggcagccacugcaccuacgugagcaaguucagcaccgugcccgugagccaccacgagugcagcuuccugaagcccugccugugcgugagccagagaagcaacagcggaggaggaggaucuggaggcggcggaagugguggaggaggaagcggaggagguggcagcggaggugguggaaguggcggcggaggaagccccugcugccacgugacccagcugagagcccagcaccugcuggcccuggagaacaucagcgacaucuaccuggugagcaaccagaccugcgacggcuucagccuggccagccugaacagccccaagaacggcagcaaccagcuggugaucagcagaugcgccaacggccugaacguggugagcuucuucaucagcauccugaagagaagcagcagcgcccugaccggccaccugagagagcugcugaccacccuggagacccuguacggcagcuucagcguggaggaccuguucggcgccaaccugaacagauacgccuggcacagaggcggcggaggagguggcuccgguggagguggcagcggaggaggaggcagugguggcggaggcagccuuagcgaggugaagcuccacuuggacaucgagggccacgccagccacuacaccauccccuggaccgagcucauggccaaggugcccggccuuagccccgaggcccuguggcgggaggccaacgugaccgaggaccuggccagcaugcugaaccgguacaagcugaucuacaagaccagcggcacccugggcaucgcccuggccgagcccguggacauccccgccguuagcgaaggcagcaugcagguggacgccagcaaggugcaccccggcgugaucagcggccugaacagccccgccuguauguugagcgccccacuggagaagcagcuguucuacuacaucggcaccaugcugcccaacacccggccccacagcuacguguucuaccagcugcggugccaccugagcuacguugcccugagcaucaacggcgacaaguuccaguacaccggcgccaugaccagcaaguuccugaugggcaccuacaagcgggucaccgagaagggcgacgagcacgugcugucacugguguucggcaagaccaaggaccugcccgaccugcggggccccuucagcuacccuaguuugaccagcgcccagagcggcgacuacagcuuggugaucgugaccaccuucgugcacuacgccaacuuccacaacuacuucgugcccaaccugaaggacauguucagccgggccgugaccaugacugccgcuucuuacgcccgguacgugcugcagaagcugguccugcuggagaugaagggcggcugccgggagcccgagcuggacaccgaaacacugaccaccauguucgaggugagcguggccuucuucaaggugggucacgcggugggcgaaaccggcaacggcugcguggacuuacgcuggcuggccaagagcuucuucgagcugaccgugcugaaggauaucaucggcaucugcuacggcgccaccgugaagggcaugcagagcuacggccuggagcggcuggccgccaugcuuauggcaacagugaagauggaggagcugggacaccugacaacagagaagcaggaguacgcccugagacuggccacagugggcuacccaaaggccggcguguacaguggacugaucggcggcgcaaccagcgugcugcuauccgcuuacaaccggcacccgcuguuccagccccugcacaccgugaugcgggaaacccuguucaucggaagccacgucgugcugcgggagcugaggcugaacguaaccacccagggcccuaaucuggcccuguaucagcuccucaguaccgcccugugcagcgcccuugagaucggcgaggugcucagaggccuggcccucgguaccgagagcggccucuucagcccaugcuacuuaagccugcgguucgaccugacccgggacaaguugcugagcauggccccgcaggaggccacacuggaccaggcagcuguauccaacgccguggacggcuuccugggcagacugucccuggaacgggaggaccgggacgccuggcaccugccugccuacaaguguguggaucggcuggacaaggugcugaugaucaucccucugauuaaugucaccuucaucaucagcagcgaccgggaggugcggggauccgcccucuacgaggccagcaccaccuaucugagcagcagccuguuccugucuccugugaucaugaacaagugcagccagggcgccguggccggcgagccccggcagauccccaagauccagaacuucacccggacccagaagucuugcaucuucugcggcuucgcccuuuuguccuacgacgagaaggagggcuuggagacuacaaccuacaucaccagccaggaggugcagaacagcauccugucaucuaauuacuucgacuucgacaaccugcacguucauuaccugcuccucaccaccaacgguaccgucauggaaaucgccggacuguacgaggagcgggcccauguugugcuggccaucauccuguacuucaucgcuuucgcacuuggcaucuuccuggugcacaagaucgugauguucuuccug

SEQ ID NO: 217 - protein, 1071 aa, Artificial Sequence
  Synthetic Polypeptide
MVSFKQVRVPLFTAIALVIVLLLAYFLPPRVRGGGRVAAAAITWVPKPNVEVWPVDPPPPVNFNKTAEQEYGDKEVKLPHWTPTLHTFQVPQNYTKANCTYCNTREYTFSYKGCCFYFTKKKHTWNGCFQACAELYPCTYFYGPTPDILPVVTRNLNAIESLWVGVYRVGEGNWTSLDGGTFKVYQIFGSHCTYVSKFSTVPVSHHECSFLKPCLCVSQRSNSGGGGSGGGGSGGGGSGGGGSGGGGSGGGGSPCCHVTQLRAQHLLALENISDIYLVSNQTCDGFSLASLNSPKNGSNQLVISRCANGLNVVSFFISILKRSSSALTGHLRELLTTLETLYGSFSVEDLFGANLNRYAWHRGGGGGGSGGGGSGGGGSGGGGSLSEVKLHLDIEGHASHYTIPWTELMAKVPGLSPEALWREANVTEDLASMLNRYKLIYKTSGTLGIALAEPVDIPAVSEGSMQVDASKVHPGVISGLNSPACMLSAPLEKQLFYYIGTMLPNTRPHSYVFYQLRCHLSYVALSINGDKFQYTGAMTSKFLMGTYKRVTEKGDEHVLSLVFGKTKDLPDLRGPFSYPSLTSAQSGDYSLVIVTTFVHYANFHNYFVPNLKDMFSRAVTMTAASYARYVLQKLVLLEMKGGCREPELDTETLTTMFEVSVAFFKVGHAVGETGNGCVDLRWLAKSFFELTVLKDIIGICYGATVKGMQSYGLERLAAMLMATVKMEELGHLTTEKQEYALRLATVGYPKAGVYSGLIGGATSVLLSAYNRHPLFQPLHTVMRETLFIGSHVVLRELRLNVTTQGPNLALYQLLSTALCSALEIGEVLRGLALGTESGLFSPCYLSLRFDLTRDKLLSMAPQEATLDQAAVSNAVDGFLGRLSLEREDRDAWHLPAYKCVDRLDKVLMIIPLINVTFIISSDREVRGSALYEASTTYLSSSLFLSPVIMNKCSQGAVAGEPRQIPKIQNFTRTQKSCIFCGFALLSYDEKEGLETTTYITSQEVQNSILSSNYFDFDNLHVHYLLLTTNGTVMEIAGLYEERAHVVLAIILYFIAFALGIFLVHKIVMFFL

SEQ ID NO: 218 - RNA, 2693 nt, Artificial Sequence
  Synthetic Polynucleotide
gggaaauaagagagaaaagaagaguaagaagaaauauaagaccccggcgccgccaccaugagagccgugggcguguuccuggccaucugccuggugaccaucuucgugcugcccaccuggggcaacugggccuaccccugcugccacgugacccagcugagagcccagcaccugcuggcccuggagaacaucagcgacaucuaccuggugagcaaccagaccugcgacggcuucagccuggccagccugaacagccccaagaacggcagcaaccagcuggugaucagcagaugcgccaacggccugaacguggugagcuucuucaucagcauccugaagagaagcagcagcgcccugaccggccaccugagagagcugcugaccacccuggagacccuguacggcagcuucagcguggaggaccuguucggcgccaaccugaacagauacgccuggcacagaggcggcggaggagguggcagcggaggaggagggucuggagguggcggcagccuuagcgaggugaagcuccacuuggacaucgagggccacgccagccacuacaccauccccuggaccgagcucauggccaaggugcccggccuuagccccgaggcccuguggcgggaggccaacgugaccgaggaccuggccagcaugcugaaccgguacaagcugaucuacaagaccagcggcacccugggcaucgcccuggccgagcccguggacauccccgccguuagcgaaggcagcaugcagguggacgccagcaaggugcaccccggcgugaucagcggccugaacagccccgccuguauguugagcgccccacuggagaagcagcuguucuacuacaucggcaccaugcugcccaacacccggccccacagcuacguguucuaccagcugcggugccaccugagcuacguugcccugagcaucaacggcgacaaguuccaguacaccggcgccaugaccagcaaguuccugaugggcaccuacaagcgggucaccgagaagggcgacgagcacgugcugucacugguguucggcaagaccaaggaccugcccgaccugcggggccccuucagcuacccuaguuugaccagcgcccagagcggcgacuacagcuuggugaucgugaccaccuucgugcacuacgccaacuuccacaacuacuucgugcccaaccugaaggacauguucagccgggccgugaccaugacugccgcuucuuacgcccgguacgugcugcagaagcugguccugcuggagaugaagggcggcugccgggagcccgagcuggacaccgaaacacugaccaccauguucgaggugagcguggccuucuucaaggugggucacgcggugggcgaaaccggcaacggcugcguggacuuacgcuggcuggccaagagcuucuucgagcugaccgugcugaaggauaucaucggcaucugcuacggcgccaccgugaagggcaugcagagcuacggccuggagcggcuggccgccaugcuuauggcaacagugaagauggaggagcugggacaccugacaacagagaagcaggaguacgcccugagacuggccacagugggcuacccaaaggccggcguguacaguggacugaucggcggcgcaaccagcgugcugcuauccgcuuacaaccggcacccgcuguuccagccccugcacaccgugaugcgggaaacccuguucaucggaagccacgucgugcugcgggagcugaggcugaacguaaccacccagggcccuaaucuggcccuguaucagcuccucaguaccgcccugugcagcgcccuugagaucggcgaggugcucagaggccuggcccucgguaccgagagcggccucuucagcccaugcuacuuaagccugcgguucgaccugacccgggacaaguugcugagcauggccccgcaggaggccacacuggaccaggcagcuguauccaacgccguggacggcuuccugggcagacugucccuggaacgggaggaccgggacgccuggcaccugccugccuacaaguguguggaucggcuggacaaggugcugaugaucaucccucugauuaaugucaccuucaucaucagcagcgaccgggaggugcggggauccgcccucuacgaggccagcaccaccuaucugagcagcagccuguuccugucuccugugaucaugaacaagugcagccagggcgccguggccggcgagccccggcagauccccaagauccagaacuucacccggacccagaagucuugcaucuucugcggcuucgcccuuuuguccuacgacgagaaggagggcuuggagacuacaaccuacaucaccagccaggaggugcagaacagcauccugucaucuaauuacuucgacuucgacaaccugcacguucauuaccugcuccucaccaccaacgguaccgucauggaaaucgccggacuguacgaggagcgggcccauguugugcuggccaucauccuguacuucaucgcuuucgcacuuggcaucuuccuggugcacaagaucgugauguucuuccugugauaauaggcuggagccucgguggccuagcuucuugccccuugggccuccccccagccccuccuccccuuccugcacccguacccccguggucuuugaauaaagucugagugggcggc

SEQ ID NO: 219 - RNA, 2517 nt, Artificial Sequence
  Synthetic Polynucleotide
augagagccgugggcguguuccuggccaucugccuggugaccaucuucgugcugcccaccuggggcaacugggccuaccccugcugccacgugacccagcugagagcccagcaccugcuggcccuggagaacaucagcgacaucuaccuggugagcaaccagaccugcgacggcuucagccuggccagccugaacagccccaagaacggcagcaaccagcuggugaucagcagaugcgccaacggccugaacguggugagcuucuucaucagcauccugaagagaagcagcagcgcccugaccggccaccugagagagcugcugaccacccuggagacccuguacggcagcuucagcguggaggaccuguucggcgccaaccugaacagauacgccuggcacagaggcggcggaggagguggcagcggaggaggagggucuggagguggcggcagccuuagcgaggugaagcuccacuuggacaucgagggccacgccagccacuacaccauccccuggaccgagcucauggccaaggugcccggccuuagccccgaggcccuguggcgggaggccaacgugaccgaggaccuggccagcaugcugaaccgguacaagcugaucuacaagaccagcggcacccugggcaucgcccuggccgagcccguggacauccccgccguuagcgaaggcagcaugcagguggacgccagcaaggugcaccccggcgugaucagcggccugaacagccccgccuguauguugagcgccccacuggagaagcagcuguucuacuacaucggcaccaugcugcccaacacccggccccacagcuacguguucuaccagcugcggugccaccugagcuacguugcccugagcaucaacggcgacaaguuccaguacaccggcgccaugaccagcaaguuccugaugggcaccuacaagcgggucaccgagaagggcgacgagcacgugcugucacugguguucggcaagaccaaggaccugcccgaccugcggggccccuucagcuacccuaguuugaccagcgcccagagcggcgacuacagcuuggugaucgugaccaccuucgugcacuacgccaacuuccacaacuacuucgugcccaaccugaaggacauguucagccgggccgugaccaugacugccgcuucuuacgcccgguacgugcugcagaagcugguccugcuggagaugaagggcggcugccgggagcccgagcuggacaccgaaacacugaccaccauguucgaggugagcguggccuucuucaaggugggucacgcggugggcgaaaccggcaacggcugcguggacuuacgcuggcuggccaagagcuucuucgagcugaccgugcugaaggauaucaucggcaucugcuacggcgccaccgugaagggcaugcagagcuacggccuggagcggcuggccgccaugcuuauggcaacagugaagauggaggagcugggacaccugacaacagagaagcaggaguacgcccugagacuggccacagugggcuacccaaaggccggcguguacaguggacugaucggcggcgcaaccagcgugcugcuauccgcuuacaaccggcacccgcuguuccagccccugcacaccgugaugcgggaaacccuguucaucggaagccacgucgugcugcgggagcugaggcugaacguaaccacccagggcccuaaucuggcccuguaucagcuccucaguaccgcccugugcagcgcccuugagaucggcgaggugcucagaggccuggcccucgguaccgagagcggccucuucagcccaugcuacuuaagccugcgguucgaccugacccgggacaaguugcugagcauggccccgcaggaggccacacuggaccaggcagcuguauccaacgccguggacggcuuccugggcagacugucccuggaacgggaggaccgggacgccuggcaccugccugccuacaaguguguggaucggcuggacaaggugcugaugaucaucccucugauuaaugucaccuucaucaucagcagcgaccgggaggugcggggauccgcccucuacgaggccagcaccaccuaucugagcagcagccuguuccugucuccugugaucaugaacaagugcagccagggcgccguggccggcgagccccggcagauccccaagauccagaacuucacccggacccagaagucuugcaucuucugcggcuucgcccuuuuguccuacgacgagaaggagggcuuggagacuacaaccuacaucaccagccaggaggugcagaacagcauccugucaucuaauuacuucgacuucgacaaccugcacguucauuaccugcuccucaccaccaacgguaccgucauggaaaucgccggacuguacgaggagcgggcccauguugugcuggccaucauccuguacuucaucgcuuucgcacuuggcaucuuccuggugcacaagaucgugauguucuuccug

SEQ ID NO: 220 - protein, 839 aa, Artificial Sequence
  Synthetic Polypeptide
MRAVGVFLAICLVTIFVLPTWGNWAYPCCHVTQLRAQHLLALENISDIYLVSNQTCDGFSLASLNSPKNGSNQLVISRCANGLNVVSFFISILKRSSSALTGHLRELLTTLETLYGSFSVEDLFGANLNRYAWHRGGGGGGSGGGGSGGGGSLSEVKLHLDIEGHASHYTIPWTELMAKVPGLSPEALWREANVTEDLASMLNRYKLIYKTSGTLGIALAEPVDIPAVSEGSMQVDASKVHPGVISGLNSPACMLSAPLEKQLFYYIGTMLPNTRPHSYVFYQLRCHLSYVALSINGDKFQYTGAMTSKFLMGTYKRVTEKGDEHVLSLVFGKTKDLPDLRGPFSYPSLTSAQSGDYSLVIVTTFVHYANFHNYFVPNLKDMFSRAVTMTAASYARYVLQKLVLLEMKGGCREPELDTETLTTMFEVSVAFFKVGHAVGETGNGCVDLRWLAKSFFELTVLKDIIGICYGATVKGMQSYGLERLAAMLMATVKMEELGHLTTEKQEYALRLATVGYPKAGVYSGLIGGATSVLLSAYNRHPLFQPLHTVMRETLFIGSHVVLRELRLNVTTQGPNLALYQLLSTALCSALEIGEVLRGLALGTESGLFSPCYLSLRFDLTRDKLLSMAPQEATLDQAAVSNAVDGFLGRLSLEREDRDAWHLPAYKCVDRLDKVLMIIPLINVTFIISSDREVRGSALYEASTTYLSSSLFLSPVIMNKCSQGAVAGEPRQIPKIQNFTRTQKSCIFCGFALLSYDEKEGLETTTYITSQEVQNSILSSNYFDFDNLHVHYLLLTTNGTVMEIAGLYEERAHVVLAIILYFIAFALGIFLVHKIVMFFL

SEQ ID NO: 221 - RNA, 2708 nt, Artificial Sequence
  Synthetic Polynucleotide
gggaaauaagagagaaaagaagaguaagaagaaauauaagaccccggcgccgccaccaugagagccgugggcguguuccuggccaucugccuggugaccaucuucgugcugcccaccuggggcaacugggccuaccccugcugccacgugacccagcugagagcccagcaccugcuggcccuggagaacaucagcgacaucuaccuggugagcaaccagaccugcgacggcuucagccuggccagccugaacagccccaagaacggcagcaaccagcuggugaucagcagaugcgccaacggccugaacguggugagcuucuucaucagcauccugaagagaagcagcagcgcccugaccggccaccugagagagcugcugaccacccuggagacccuguacggcagcuucagcguggaggaccuguucggcgccaaccugaacagauacgccuggcacagaggcggcggaggagguggcuccgguggagguggcagcggaggaggaggcagugguggcggaggcagccuuagcgaggugaagcuccacuuggacaucgagggccacgccagccacuacaccauccccuggaccgagcucauggccaaggugcccggccuuagccccgaggcccuguggcgggaggccaacgugaccgaggaccuggccagcaugcugaaccgguacaagcugaucuacaagaccagcggcacccugggcaucgcccuggccgagcccguggacauccccgccguuagcgaaggcagcaugcagguggacgccagcaaggugcaccccggcgugaucagcggccugaacagccccgccuguauguugagcgccccacuggagaagcagcuguucuacuacaucggcaccaugcugcccaacacccggccccacagcuacguguucuaccagcugcggugccaccugagcuacguugcccugagcaucaacggcgacaaguuccaguacaccggcgccaugaccagcaaguuccugaugggcaccuacaagcgggucaccgagaagggcgacgagcacgugcugucacugguguucggcaagaccaaggaccugcccgaccugcggggccccuucagcuacccuaguuugaccagcgcccagagcggcgacuacagcuuggugaucgugaccaccuucgugcacuacgccaacuuccacaacuacuucgugcccaaccugaaggacauguucagccgggccgugaccaugacugccgcuucuuacgcccgguacgugcugcagaagcugguccugcuggagaugaagggcggcugccgggagcccgagcuggacaccgaaacacugaccaccauguucgaggugagcguggccuucuucaaggugggucacgcggugggcgaaaccggcaacggcugcguggacuuacgcuggcuggccaagagcuucuucgagcugaccgugcugaaggauaucaucggcaucugcuacggcgccaccgugaagggcaugcagagcuacggccuggagcggcuggccgccaugcuuauggcaacagugaagauggaggagcugggacaccugacaacagagaagcaggaguacgcccugagacuggccacagugggcuacccaaaggccggcguguacaguggacugaucggcggcgcaaccagcgugcugcuauccgcuuacaaccggcacccgcuguuccagccccugcacaccgugaugcgggaaacccuguucaucggaagccacgucgugcugcgggagcugaggcugaacguaaccacccagggcccuaaucuggcccuguaucagcuccucaguaccgcccugugcagcgcccuugagaucggcgaggugcucagaggccuggcccucgguaccgagagcggccucuucagcccaugcuacuuaagccugcgguucgaccugacccgggacaaguugcugagcauggccccgcaggaggccacacuggaccaggcagcuguauccaacgccguggacggcuuccugggcagacugucccuggaacgggaggaccgggacgccuggcaccugccugccuacaaguguguggaucggcuggacaaggugcugaugaucaucccucugauuaaugucaccuucaucaucagcagcgaccgggaggugcggggauccgcccucuacgaggccagcaccaccuaucugagcagcagccuguuccugucuccugugaucaugaacaagugcagccagggcgccguggccggcgagccccggcagauccccaagauccagaacuucacccggacccagaagucuugcaucuucugcggcuucgcccuuuuguccuacgacgagaaggagggcuuggagacuacaaccuacaucaccagccaggaggugcagaacagcauccugucaucuaauuacuucgacuucgacaaccugcacguucauuaccugcuccucaccaccaacgguaccgucauggaaaucgccggacuguacgaggagcgggcccauguugugcuggccaucauccuguacuucaucgcuuucgcacuuggcaucuuccuggugcacaagaucgugauguucuuccugugauaauaggcuggagccucgguggccuagcuucuugccccuugggccuccccccagccccuccuccccuuccugcacccguacccccguggucuuugaauaaagucugagugggcggc

SEQ ID NO: 222 - RNA, 2532 nt, Artificial Sequence
  Synthetic Polynucleotide
augagagccgugggcguguuccuggccaucugccuggugaccaucuucgugcugcccaccuggggcaacugggccuaccccugcugccacgugacccagcugagagcccagcaccugcuggcccuggagaacaucagcgacaucuaccuggugagcaaccagaccugcgacggcuucagccuggccagccugaacagccccaagaacggcagcaaccagcuggugaucagcagaugcgccaacggccugaacguggugagcuucuucaucagcauccugaagagaagcagcagcgcccugaccggccaccugagagagcugcugaccacccuggagacccuguacggcagcuucagcguggaggaccuguucggcgccaaccugaacagauacgccuggcacagaggcggcggaggagguggcuccgguggagguggcagcggaggaggaggcagugguggcggaggcagccuuagcgaggugaagcuccacuuggacaucgagggccacgccagccacuacaccauccccuggaccgagcucauggccaaggugcccggccuuagccccgaggcccuguggcgggaggccaacgugaccgaggaccuggccagcaugcugaaccgguacaagcugaucuacaagaccagcggcacccugggcaucgcccuggccgagcccguggacauccccgccguuagcgaaggcagcaugcagguggacgccagcaaggugcaccccggcgugaucagcggccugaacagccccgccuguauguugagcgccccacuggagaagcagcuguucuacuacaucggcaccaugcugcccaacacccggccccacagcuacguguucuaccagcugcggugccaccugagcuacguugcccugagcaucaacggcgacaaguuccaguacaccggcgccaugaccagcaaguuccugaugggcaccuacaagcgggucaccgagaagggcgacgagcacgugcugucacugguguucggcaagaccaaggaccugcccgaccugcggggccccuucagcuacccuaguuugaccagcgcccagagcggcgacuacagcuuggugaucgugaccaccuucgugcacuacgccaacuuccacaacuacuucgugcccaaccugaaggacauguucagccgggccgugaccaugacugccgcuucuuacgcccgguacgugcugcagaagcugguccugcuggagaugaagggcggcugccgggagcccgagcuggacaccgaaacacugaccaccauguucgaggugagcguggccuucuucaaggugggucacgcggugggcgaaaccggcaacggcugcguggacuuacgcuggcuggccaagagcuucuucgagcugaccgugcugaaggauaucaucggcaucugcuacggcgccaccgugaagggcaugcagagcuacggccuggagcggcuggccgccaugcuuauggcaacagugaagauggaggagcugggacaccugacaacagagaagcaggaguacgcccugagacuggccacagugggcuacccaaaggccggcguguacaguggacugaucggcggcgcaaccagcgugcugcuauccgcuuacaaccggcacccgcuguuccagccccugcacaccgugaugcgggaaacccuguucaucggaagccacgucgugcugcgggagcugaggcugaacguaaccacccagggcccuaaucuggcccuguaucagcuccucaguaccgcccugugcagcgcccuugagaucggcgaggugcucagaggccuggcccucgguaccgagagcggccucuucagcccaugcuacuuaagccugcgguucgaccugacccgggacaaguugcugagcauggccccgcaggaggccacacuggaccaggcagcuguauccaacgccguggacggcuuccugggcagacugucccuggaacgggaggaccgggacgccuggcaccugccugccuacaaguguguggaucggcuggacaaggugcugaugaucaucccucugauuaaugucaccuucaucaucagcagcgaccgggaggugcggggauccgcccucuacgaggccagcaccaccuaucugagcagcagccuguuccugucuccugugaucaugaacaagugcagccagggcgccguggccggcgagccccggcagauccccaagauccagaacuucacccggacccagaagucuugcaucuucugcggcuucgcccuuuuguccuacgacgagaaggagggcuuggagacuacaaccuacaucaccagccaggaggugcagaacagcauccugucaucuaauuacuucgacuucgacaaccugcacguucauuaccugcuccucaccaccaacgguaccgucauggaaaucgccggacuguacgaggagcgggcccauguugugcuggccaucauccuguacuucaucgcuuucgcacuuggcaucuuccuggugcacaagaucgugauguucuuccug

SEQ ID NO: 223 - protein, 844 aa, Artificial Sequence
  Synthetic Polypeptide
MRAVGVFLAICLVTIFVLPTWGNWAYPCCHVTQLRAQHLLALENISDIYLVSNQTCDGFSLASLNSPKNGSNQLVISRCANGLNVVSFFISILKRSSSALTGHLRELLTTLETLYGSFSVEDLFGANLNRYAWHRGGGGGGSGGGGSGGGGSGGGGSLSEVKLHLDIEGHASHYTIPWTELMAKVPGLSPEALWREANVTEDLASMLNRYKLIYKTSGTLGIALAEPVDIPAVSEGSMQVDASKVHPGVISGLNSPACMLSAPLEKQLFYYIGTMLPNTRPHSYVFYQLRCHLSYVALSINGDKFQYTGAMTSKFLMGTYKRVTEKGDEHVLSLVFGKTKDLPDLRGPFSYPSLTSAQSGDYSLVIVTTFVHYANFHNYFVPNLKDMFSRAVTMTAASYARYVLQKLVLLEMKGGCREPELDTETLTTMFEVSVAFFKVGHAVGETGNGCVDLRWLAKSFFELTVLKDIIGICYGATVKGMQSYGLERLAAMLMATVKMEELGHLTTEKQEYALRLATVGYPKAGVYSGLIGGATSVLLSAYNRHPLFQPLHTVMRETLFIGSHVVLRELRLNVTTQGPNLALYQLLSTALCSALEIGEVLRGLALGTESGLFSPCYLSLRFDLTRDKLLSMAPQEATLDQAAVSNAVDGFLGRLSLEREDRDAWHLPAYKCVDRLDKVLMIIPLINVTFIISSDREVRGSALYEASTTYLSSSLFLSPVIMNKCSQGAVAGEPRQIPKIQNFTRTQKSCIFCGFALLSYDEKEGLETTTYITSQEVQNSILSSNYFDFDNLHVHYLLLTTNGTVMEIAGLYEERAHVVLAIILYFIAFALGIFLVHKIVMFFL

SEQ ID NO: 224 - protein, 15 aa, Artificial Sequence
  Synthetic Polypeptide
GGGGSGGGGSGGGGS

SEQ ID NO: 225 - protein, 20 aa, Artificial Sequence
  Synthetic Polypeptide
GGGGSGGGGSGGGGSGGGGS

SEQ ID NO: 226 - protein, 4 aa, Artificial Sequence
  Synthetic Polypeptide
GGGS

SEQ ID NO: 227 - protein, 5 aa, Artificial Sequence
  Synthetic Polypeptide
GGGGS

SEQ ID NO: 228 - RNA, 2294 nt, Artificial Sequence
  Synthetic Polynucleotide
gggaaauaagagagaaaagaagaguaagaagaaauauaagaccccggcgccgccaccaugcaguuguugugcguguucugccucguguuacucugggaggugggcgccgccagccuuagcgaggugaagcuccacuuggacaucgagggccacgccagccacuacaccauccccuggaccgagcucauggccaaggugcccggccuuagccccgaggcccuguggcgggaggccaacgugaccgaggaccuggccagcaugcugaaccgguacaagcugaucuacaagaccagcggcacccugggcaucgcccuggccgagcccguggacauccccgccguuagcgaaggcagcaugcagguggacgccagcaaggugcaccccggcgugaucagcggccugaacagccccgccuguauguugagcgccccacuggagaagcagcuguucuacuacaucggcaccaugcugcccaacacccggccccacagcuacguguucuaccagcugcggugccaccugagcuacguugcccugagcaucaacggcgacaaguuccaguacaccggcgccaugaccagcaaguuccugaugggcaccuacaagcgggucaccgagaagggcgacgagcacgugcugucacugguguucggcaagaccaaggaccugcccgaccugcggggccccuucagcuacccuaguuugaccagcgcccagagcggcgacuacagcuuggugaucgugaccaccuucgugcacuacgccaacuuccacaacuacuucgugcccaaccugaaggacauguucagccgggccgugaccaugacugccgcuucuuacgcccgguacgugcugcagaagcugguccugcuggagaugaagggcggcugccgggagcccgagcuggacaccgaaacacugaccaccauguucgaggugagcguggccuucuucaaggugggucacgcggugggcgaaaccggcaacggcugcguggacuuacgcuggcuggccaagagcuucuucgagcugaccgugcugaaggauaucaucggcaucugcuacggcgccaccgugaagggcaugcagagcuacggccuggagcggcuggccgccaugcuuauggcaacagugaagauggaggagcugggacaccugacaacagagaagcaggaguacgcccugagacuggccacagugggcuacccaaaggccggcguguacaguggacugaucggcggcgcaaccagcgugcugcuauccgcuuacaaccggcacccgcuguuccagccccugcacaccgugaugcgggaaacccuguucaucggaagccacgucgugcugcgggagcugaggcugaacguaaccacccagggcccuaaucuggcccuguaucagcuccucaguaccgcccugugcagcgcccuugagaucggcgaggugcucagaggccuggcccucgguaccgagagcggccucuucagcccaugcuacuuaagccugcgguucgaccugacccgggacaaguugcugagcauggccccgcaggaggccacacuggaccaggcagcuguauccaacgccguggacggcuuccugggcagacugucccuggaacgggaggaccgggacgccuggcaccugccugccuacaaguguguggaucggcuggacaaggugcugaugaucaucccucugauuaaugucaccuucaucaucagcagcgaccgggaggugcggggauccgcccucuacgaggccagcaccaccuaucugagcagcagccuguuccugucuccugugaucaugaacaagugcagccagggcgccguggccggcgagccccggcagauccccaagauccagaacuucacccggacccagaagucuugcaucuucugcggcuucgcccuuuuguccuacgacgagaaggagggcuuggagacuacaaccuacaucaccagccaggaggugcagaacagcauccugucaucuaauuacuucgacuucgacaaccugcacguucauuaccugcuccucaccaccaacgguaccgucauggaaaucgccggacuguacgaggagcgggcccauguugugcuggccaucauccuguacuucaucgcuuucgcacuuggcaucuuccuggugcacaagaucgugauguucuuccugugauaauaggcuggagccucgguggccaugcuucuugccccuugggccuccccccagccccuccuccccuuccugcacccguacccccguggucuuugaauaaagucugagugggcggc

SEQ ID NO: 229 - RNA, 587 nt, Artificial Sequence
  Synthetic Polynucleotide
gggaaauaagagagaaaagaagaguaagaagaaauauaagaccccggcgccgccaccaugagagccgugggcguguuccuggccaucugccuggugaccaucuucgugcugcccaccuggggcaacugggccuaccccugcugccacgugacccagcugagagcccagcaccugcuggcccuggagaacaucagcgacaucuaccuggugagcaaccagaccugcgacggcuucagccuggccagccugaacagccccaagaacggcagcaaccagcuggugaucagcagaugcgccaacggccugaacguggugagcuucuucaucagcauccugaagagaagcagcagcgcccugaccggccaccugagagagcugcugaccacccuggagacccuguacggcagcuucagcguggaggaccuguucggcgccaaccugaacagauacgccuggcacagaggcggcugauaauaggcuggagccucgguggccaugcuucuugccccuugggccuccccccagccccuccuccccuuccugcacccguacccccguggucuuugaauaaagucugagugggcggc

What is claimed is:

1. An Epstein-Barr virus (EBV) vaccine, comprising a ribonucleic acid (RNA) having an open reading frame (ORF) encoding an EBV antigen, wherein intramuscular (IM) administration of a therapeutically effective amount of the vaccine to a subject induces in the subject a neutralizing antibody titer and/or a T cell immune response.

2. The vaccine of claim 1, wherein the neutralizing antibody titer is at least 100 neutralizing units per milliliter (NU/mL).

3. The vaccine of claim 2, wherein the neutralizing antibody titer is at least 500 NU/mL.

4. The vaccine of claim 3, wherein the neutralizing antibody titer is at least 1000 NU/mL.

5. The vaccine of any one of claims 1-4, wherein the neutralizing antibody titer is sufficient to reduce EBV infection of B cells by at least 50% relative to a neutralizing antibody titer of an unvaccinated control subject or relative to a neutralizing antibody titer of a subject vaccinated with a live attenuated EBV vaccine, an inactivated EBV vaccine, or a protein subunit EBV vaccine.

6. The vaccine of any one of claims 1-5, wherein the neutralizing antibody titer is induced in the subject following fewer than three doses of the vaccine.

7. The vaccine of any one of claims 1-6, wherein a single dose is of 10 μg-100 μg.

8. The vaccine of any one of claims 1-7, wherein the neutralizing antibody titer and/or a T cell immune response is sufficient to reduce the rate of symptomatic infectious mononucleosis relative to the neutralizing antibody titer of unvaccinated control subjects.

9. The vaccine of any one of claims 1-8, wherein the neutralizing antibody titer and/or a T cell immune response is sufficient to reduce the rate of asymptomatic EBV infection relative to the neutralizing antibody titer of unvaccinated control subjects.

10. The vaccine of any one of claims 1-9, wherein the neutralizing antibody titer and/or a T cell immune response is sufficient to prevent EBV latency the subject.

11. The vaccine of any one of claims 1-10, wherein the neutralizing antibody titer is sufficient to block fusion of EBV with epithelial cells and/or B cells of the subject.

12. The vaccine of any one of claims 1-11, wherein the neutralizing antibody titer is induced within 20 days following a single 10-100 μg dose of the vaccine.

13. The vaccine of any one of claims 1-12, wherein the neutralizing antibody titer is induced within 40 days following a second 10-100 μg dose of the vaccine.

14. The vaccine of any one of claims 1-13, wherein the T cell immune response comprises a CD4⁺ T cell immune response.

15. The vaccine of any one of claims 1-14, wherein the T cell immune response comprises a CD8⁺ T cell immune response.

16. The vaccine of any one of claims 1-15, wherein the EBV antigen is expressed on the surface of cells of the subject.

17. The vaccine of any one of claims 1-16, wherein a single 2 μg dose of the vaccine induces in mice NT₅₀ neutralizing antibody titers of about 100.

18. The vaccine of claim 17, wherein a 2 μg booster dose of the vaccine induces in mice NT₅₀ neutralizing antibody titers.

19. The vaccine of any one of claims 1-18, wherein the EBV vaccine comprises
(a) a ribonucleic acid (RNA) having an open reading frame (ORF) encoding two EBV antigens, or
(b) two RNAs, each having an ORF encoding an EBV antigen.

20. The vaccine of any one of claims 1-19, wherein the vaccine comprises a RNA having an ORF encoding two EBV antigens formulated in a lipid nanoparticle.

21. The vaccine of any one of claims 1-19, wherein the vaccine comprises two RNAs, each having an ORF encoding an EBV antigen, wherein the two RNAs are formulated in a single lipid nanoparticle.

22. The vaccine of any one of claims 1-19, wherein the vaccine comprises two RNAs, each having an ORF encoding an EBV antigen, wherein the each RNAs is formulated in a single lipid nanoparticle.

23. The vaccine of any one of claims 1-22, further comprising at least one additional RNA having an ORF encoding at least one additional EBV antigen.

24. The vaccine of any one of claims 20-23, wherein the lipid nanoparticle comprises a molar ratio of 20-60% ionizable cationic lipid, 5-25% non-cationic lipid, 25-55% sterol, and 0.5-15% PEG-modified lipid.

25. The vaccine of any one of claims 1-24, wherein the EBV antigens are selected from the group consisting of: gp350, gH, gL, gB, gp42, LMP1, LMP2, EBNA1, and EBNA3.

26. The vaccine of claim 25, wherein the EBV antigens include EBV gp350 antigen, EBV gH antigen, and EBV gL antigen, optionally wherein the EBV gH antigen is linked to the EBV gL antigen, optionally wherein the linker comprises a GGGGS motif, and optionally wherein the linker comprises an amino acid sequence of SEQ ID NO: 224 or SEQ ID NO: 225.

27. The vaccine of claim 26, wherein the EBV antigens further include EBV gp42 antigen and/or gB antigen.

28. The vaccine of any one of claims 25-27, wherein the EBVgp350 antigen is a wild-type EBV gp350 antigen, a mutated EBV gp350 antigen, or a truncated EBV gp350 antigen.

29. The vaccine of any one of claims 1-28, wherein the RNA comprises or consists of a sequence selected from the group consisting of SEQ ID NOs: 201, 202, 203, 204, 207, 208, 177, 178, 179, 181, 182, 185, 187, 188, 189, 209, 218, and 221.

30. The vaccine of any one of claims 1-29, wherein the EBV antigens are fused to a scaffold moiety.

31. The vaccine of claim 30, wherein the scaffold moiety is selected from the group consisting of: ferritin, encapsulin, lumazine synthase, hepatitis B surface antigen, and hepatitis B core antigen.

32. The vaccine of any one of claims 1-31, wherein the RNA comprises messenger RNA (mRNA).

33. The vaccine of any one of claims 1-32, wherein the RNA further comprises a 5′ UTR.

34. The vaccine of claim 33, wherein the 5′ UTR comprises a sequence identified by SEQ ID NO: 1 or SEQ ID NO: 104.

35. The vaccine of any one of claims 1-34, wherein the RNA further comprises a 3′ UTR.

36. The vaccine of claim 35, wherein the 3′ UTR comprises a sequence identified by SEQ ID NO: 3 or SEQ ID NO: 106.

37. The vaccine of any one of claims 1-36, wherein the EBV antigen is fused to a signal peptide.

38. The vaccine of claim 37, wherein the signal peptide is a bovine prolactin signal peptide, optionally comprising SEQ ID NO: 115.

39. The vaccine of any one of claims 1-38, wherein the RNA is unmodified.

40. The vaccine of any one of claims 1-38, wherein the RNA comprise at least one modified nucleotide.

41. The vaccine of claim 40, wherein at least 80% of the uracil in the ORF comprise 1-methyl-pseudouridine modification.

42. A method comprising administering to a subject the EBV vaccine of any one of claims 1-41 in a therapeutically effective amount to induce in the subject a neutralizing antibody titer and/or a T cell immune response.

43. The method of claim 42, wherein efficacy of the EBV vaccine is at least 80% relative to unvaccinated control subjects.

44. The method of claim 42 or 43, wherein detectable levels of EBV antigen are produced in the serum of the subject at 1-72 hours post administration of the vaccine.

45. The method of any one of claims 42-44, wherein a neutralizing antibody titer of at least 100 NU/ml is produced in the serum of the subject at 1-72 hours post administration of the vaccine.

46. The method of claim 45, wherein a neutralizing antibody titer of at least 500 NU/ml is produced in the serum of the subject at 1-72 hours post administration of the vaccine.

47. The method of claim 46, wherein a neutralizing antibody titer of at least 1000 NU/ml is produced in the serum of the subject at 1-72 hours post administration of the vaccine.

48. The method of any one of claims 42-47, wherein the therapeutically effective amount is a total dose of 20 μg-200 μg.

49. The method of claim 48, wherein the therapeutically effective amount is a total dose of 50 μg-100 μg.
